(19) United States
(12) Patent Application Publication
(10) Pub. No.: US 2024/0041010 A1
(43) Pub. Date: Feb. 8, 2024

(54) GENERATION OF SURROGATE SIRES AND DAMS BY ABLATION OF ENDOGENOUS GERMLINE

(71) Applicant: University of Maryland, College Park, College Park, MD (US)

(72) Inventors: Bhanu Prakash Telugu, Laurel, MD (US); KI-EUN PARK, Reisterstown, MD (US); CHI-HUN PARK, Colombia, MO (US)

(21) Appl. No.: 18/007,156

(22) PCT Filed: Jul. 30, 2021
(86) PCT No.: PCT/US2021/043921

§ 371 Date: Jan. 27, 2023

Related U.S. Application Data
(60) Provisional application No. 62/706,091, filed on Jul. 31, 2020.
(60) Provisional application No. 62/706,410, filed on Aug. 14, 2020.

(51) Int. Cl. A01K 67/027; C12N 5/073; C12N 15/11; C12N 9/22; C12N 15/873

(52) U.S. Cl. CPC A01K 67/0271; C12N 5/0604; C12N 15/11; C12N 9/22; C12N 15/873; C12N 2310/20; C12N 2800/80; A01K 2227/105; A01K 2227/108; A01K 2227/101; A01K 2217/075; A01K 2217/054

(57) ABSTRACT

A method is provided of producing chimeric embryos and animals with exclusively donor-derived germ cells. Inactivation of a primordial germ cell specification gene results in the loss of primordial germ cells, the precursor cells for future sperm and egg, and in total loss of the endogenous germline. When complemented with embryonic cells from a desired donor, the resulting surrogate animal has all the resulting germline, and subsequent spermatogenesis, of the donor.

### CROSS-REFERENCE TO RELATED APPLICATIONS

[0001] This application claims priority to provisional applications U.S. Ser. No. 62/706,091 filed Jul. 31, 2020 and U.S. Ser. No. 62/706,410 filed Aug. 14, 2020, which are incorporated herein by reference in their entireties.

### SEQUENCE LISTING

[0002] The instant application contains a sequence listing which has been submitted in ASCII format by electronic submission and is hereby incorporated by reference in its entirety. Said ASCII copy, created on Jul. 30, 2021, is named P13292WO00_ST25.txt and is 962,907 bytes in size.

### TECHNICAL FIELD

[0003] The invention relates to chimeric animals having germ cells exclusively derived from a donor and methods for making the same.

### BACKGROUND

[0004] The generation of a genetically engineered line of animals requires targeted modifications in the germline to be successfully transmitted to the next generation. However, aggregation of genetically modified pluripotent cells from another embryo or pluripotent stem cells including embryonic stem (ES) cells or induced pluripotent stem cells (iPS) or embryonic germ cells (EGC) often results in a lack of occupation of the germline and a failure to contribute to the germline in the chimeric offspring.

[0005] Due to the difficulties in generating chimeras that show germline expression from otherwise validated ES cell lines, it is an object of the present invention to establish a method which guarantees germline transmission in the first generation by taking advantage and manipulating the genes involved in the primordial germ cells (PGC) specification pathway. Other objects will become apparent from the description of the invention which follows.

### SUMMARY

[0006] The present disclosure provides methods for producing a non-human chimeric embryo or chimeric animal with donor-derived pluripotent cells. The methods comprise providing a host embryo comprising an inactivated primordial germ cell (PGC) specification gene; and complementing the host embryo with donor cells to yield a chimeric embryo such that the germ cells of the chimeric embryo are exclusively derived from the donor cells.

[0007] In some embodiments, the methods of producing the chimeric embryo include use of a blastocyst complementation technique. In another embodiment, the methods of producing the chimeric embryo include use of an embryo-embryo aggregation technique. In some embodiments, the host embryo is complemented at the blastocyst stage. In another embodiment, the host embryo is complemented at the 4-cell stage, 6-cell stage, or 8-cell stage.

[0008] In some embodiments, the inactivated PGC specification gene is PRDM14. In another embodiment, the inactivated PGC specification gene is PRDM1, SALL4, IFITM1, DPPA3, DDX4, KITLG, DAZL, DND1, PRMT5, NANOG, AICDA, or TIAL1. The inactivation of the PGC specification gene may be accomplished by any known transgenic technique such as RNAi, or gene editing including by use of a meganuclease, a TALEN, a zinc finger nuclease, RNA-guided CRISPR-Cas, base editors, retrons, or the like. In an exemplary embodiment, the inactivation of the PGC specification gene is accomplished by injecting a zygote with a Cas protein and a guide RNA that targets the PGC specification gene.

[0009] In some embodiments, the donor cells comprise one or more pluripotent cells. In some embodiments, one or more pluripotent cells comprise embryonic stem cells, embryonic germ cells, or induced pluripotent stem cells. In another embodiment, the one or more pluripotent cells comprise a blastomere of a 4-cell stage donor embryo. In certain embodiments, the animal is a mouse, a pig, or cattle.

[0010] In some embodiments, the methods further comprise transferring the chimeric embryo into a recipient female animal; and allowing the transferred chimeric embryo to develop to term as a chimeric animal. In some embodiments, the methods further comprise breeding the chimeric animal with a second animal to produce one or more progeny animals.

[0011] Non-human chimeric embryos and chimeric animals produced by the foregoing methods are provided. Also described herein is a non-human chimeric embryo comprising host cells and donor cells. The host cells of the chimeric embryo comprise an inactivated PGC specification gene and the donor cells exclusively contribute to the germ cells of the chimeric embryo. In some embodiments, the inactivated PGC specification gene is PRDM14. In another embodiment, the inactivated PGC specification gene is PRDM1, SALL4, IFITM1, DPPA3, DDX4, KITLG, DAZL, DND1, PRMT5, NANOG, AICDA, or TIAL1. Non-human chimeric animals developed from the chimeric embryos are also provided.

[0012] While multiple embodiments are disclosed, still other embodiments of the present invention will become apparent to those skilled in the art from the following detailed description, which shows and describes illustrative embodiments of the invention. Accordingly, the figures and detailed description are to be regarded as illustrative in nature and not restrictive.

### BRIEF DESCRIPTION OF THE DRAWINGS

[0013] The following drawings form part of the specification and are included to further demonstrate certain embodiments or various aspects of the invention. In some instances, embodiments of the invention can be best understood by referring to the accompanying drawings in combination with the detailed description presented herein. The description and accompanying drawings may highlight a certain specific example, or a certain aspect of the invention. However, one skilled in the art will understand that portions of the example or aspect may be used in combination with other examples or aspects of the invention.

[0014] FIG. 1A-C is a schematic of germline specification via genome editing. Injection of wildtype embryos with CRISPR reagents to ablate PRDM14, and aggregate with GFP embryo. Chimeric surrogate sire lacking endogenous germline have exclusive contribution of gonad by donor GFP embryo. The founder animal that sires a wildtype embryo is expected to generate GFP offspring in F1 generation. This is confirmed by GFP litters in left and middle panel, compared to non-GFP age matched wildtype offspring on the right.

[0015] FIG. 2A-B shows chimeric blastocysts generated after embryo aggregation. FIG. 2A is a bright-field image. FIG. 2B is a GFP image.

[0016] FIG. 3A-C shows chimeric founder (F₀) pups born from embryo-embryo aggregations. FIG. 3A shows a chimeric pup from replicate 1. FIG. 3B shows a chimeric pup from replicate 2. FIG. 3C shows wild-type, age-matched control pups.

[0017] FIG. 4A-B shows chimeric founder (F₀) pups born from blastocyst complementation with R1 cells. FIG. 4A shows chimeric pups from replicate 1. FIG. 4B shows a chimeric pup from replicate 2.

[0018] FIG. 5 shows two representative F₁ litters generated from each of the R1 chimera founder males. Lack of GFP expression indicates germline occupied solely by ESC background.

[0019] FIG. 6A-C shows founder (F₀) pups born from blastocyst complementation with Cwc15^{-/-} cells. FIG. 6A shows pups from replicate 1. FIG. 6B shows a pup from replicate 2. FIG. 6C shows F₁ pups from mating of F₀ to wild-type partners. Stars indicate founder chimeras that have low levels of chimerism.

[0020] FIG. 7A-B shows gene expression of POU5F1 and NANOG at varying stages of embryo development. Least-square means of the natural log of gene copy number±SE are presented. Different letters indicate that values are significantly different (p<0.05).

[0021] FIG. 8A-B shows gene expression of SOX2 and ESRRB at varying stages of embryo development. Least-square means of the natural log of gene copy number±SE are presented. Different letters indicate that values are significantly different (p<0.05).

[0022] FIG. 9A-B shows gene expression of PRDM14 and PRDM1 at varying stages of embryo development. Least-square means of the natural log of gene copy number±SE are presented. Different letters indicate that values are significantly different (p<0.05).

[0023] FIG. 10 shows gene expression of TFAP2C at varying stages of embryo development. Least-square means of the natural log of gene copy number±SE are presented. Values are not significantly different (p>0.05).

[0024] FIG. 11A-B shows gene expression of DAZL and VASA at varying stages of embryo development. Least-square means of the natural log of gene copy number±SE are presented. Different letters indicate that values are significantly different (p<0.05).

[0025] FIG. 12 shows gene expression of STRA8 at varying stages of embryo development. Least-square means of the natural log of gene copy number±SE are presented. Values are not significantly different (p>0.05).

[0026] FIG. 13A-B shows gene expression of CARM1 and TET1 at varying stages of embryo development. Least-square means of the natural log of gene copy number±SE are presented. Different letters indicate that values are significantly different (p<0.05).

[0027] FIG. 14 shows gene expression of TET2 at varying stages of embryo development. Least-square means of the natural log of gene copy number±SE are presented. Different letters indicate that values are significantly different (p<0.05).

[0028] FIG. 15 shows a schematic outline of the surrogate sires and dams technology. Recipient embryos from a generic herd are knocked out for PGC specification gene, PRDM14, and the resultant embryo is aggregated with “donor” embryonic cells from elite animals or genome edited founder, whose genetics needs to be preserved and/or amplified for amplifying genetic gains. When the reconstituted embryos are transferred into synchronized recipient animals the resultant offspring are chimeric for somatic lineage, but the germline is exclusively from the donor animals. Because the supporting nurse cells are largely intact and unperturbed by the genetic modification, robust donor-derived spermatogenesis and oogenesis is expected in the resultant animals.

[0029] FIG. 16A-D shows generation and characterization of PRDM14 null pig fetuses. FIG. 16A is a schematic outlining the targeting strategy. In pig, the long isoform of PRDM14 is coded by 7 exons. Exon 4 represents the first common coding exon in all isoforms, and hence was targeted. A targeting oligo containing 100 bp of homology flanking the cut site and containing the “TAG” stop codon in the middle was designed such that successful gene targeting will result in the insertion of the stop codon and a “T” in the PAM motif, resulting in the knockout of the gene, and disruption of the PAM motif, such that future cuts at the targeted site will be thwarted. FIG. 16B shows the results from “targeting amplicon sequencing” with primers flanking the CRISPR cut site. The amplicons were sequenced using in-house Illumina iSeq, and the reads aligned to the putative modified allele using CRISPRESSO 2.0 software (SEQ ID NOs: 107-110). Results from representative clonal lines show greater than 96% of the reads aligning to the modified knockout allele. FIG. 16C shows RT-PCR confirmed the loss of PRDM14 and another germ cell specific transcript, DAZL in fetuses cloned from the targeted PRDM14 knockout colonies. FIG. 16D shows immunohistochemistry with antibody for PRDM14 confirmed the loss of germ cells in the fetuses.

### DETAILED DESCRIPTION OF THE PREFERRED EMBODIMENTS

[0030] Inactivation of a primordial germ cell (PGC) specification gene such as PRDM14 or PRDM1 results in the loss of PGC. When complemented with pluripotent cells from a desired donor, the resulting surrogate animal has all the resulting germline (and subsequent spermatogenesis) from the donor derived cells. One advantage of this approach is that the supporting cells originating from the host embryo are largely intact, and when the donor PGCs reach the gonad, the resulting offspring will have established robust spermatogenesis or oogenesis. The resulting surrogate sires or dams will ensure that hard earned genetic gain is preserved and amplified for robust dissemination of genetics for subsequent generations.

[0031] This approach is unique from somatic cell nuclear transfer (current paradigm) approaches for preserving the rare genetic lottery in that the majority of the embryonic cells and consequently the resulting offspring is of the host (PGC specification gene knockout) embryonic origin, with the exception of germline, which is contributed exclusively by the donor cells. Many of the drawbacks associated with somatic cell nuclear transfer such as low pregnancy/maintenance rates and altered epigenetics can be overcome, whilst ensuring robust gametogenesis for propagation/dissemination of donor genetics.

[0032] So that the present invention may be more readily understood, certain terms are first defined. Unless defined otherwise, all technical and scientific terms used herein have the same meaning as commonly understood by one of ordinary skill in the art to which embodiments of the invention pertain. Many methods and materials similar, modified, or equivalent to those described herein can be used in the practice of the embodiments of the present invention without undue experimentation, the preferred materials and methods are described herein. In describing and claiming the embodiments of the present invention, the following terminology will be used in accordance with the definitions set out below.

[0033] The singular terms “a”, “an”, and “the” include plural referents unless context clearly indicates otherwise. Similarly, the word “or” is intended to include “and” unless the context clearly indicate otherwise. The word “or” means any one member of a particular list and also includes any combination of members of that list.

[0034] Numeric ranges recited within the specification, including ranges of “greater than,” “at least”, or “less than” a numeric value, are inclusive of the numbers defining the range and include each integer within the defined range. For example, when a range of “1 to 5” is recited, the recited range should be construed as including ranges “1 to 4”, “1 to 3”, “1-2”, “1-2 & 4-5”, “1-3 & 5”, and the like.

[0035] As used herein “blastocyst” means an early developmental stage of embryo comprising of inner cell mass (from which embryo proper arises) and a fluid filled cavity typically surrounded by a single layer of trophoblast cells. “Developmental Biology”, sixth edition, ed. by Scott F. Gilbert, Sinauer Associates, Inc., Publishers, Sunderland, Mass. (2000).

[0036] The term “blastocyst complementation” as used herein refers to a technique for creating a chimeric animal in which injection of multipotent or pluripotent cells, such as ES cells and iPS cells, into an inner space of a blastocyst stage fertilized egg forms a chimeric animal when implanted into a female for gestation (e.g., pseudo-pregnant or pregnant female).

[0037] The term “chimeric blastocyst” as used herein refers to a blastocyst that comprises cellular material from a pluripotent cell derived from a different source than that of the blastocyst.

[0038] As used herein, the term “cow” or “cattle” is used generally to refer to an animal of bovine origin of any age or gender. Interchangeable terms include “bovine”, “calf”, “steer”, “bull”, “heifer” and the like. It also includes an individual animal in all stages of development, including embryonic and fetal stages.

[0039] The term “early stage embryo” means any embryo at embryonic stages between fertilized ovum and blastocyst. Typically, eight cell stage and morula stage embryos are referred to as early stage embryos.

[0040] “Embryonic germ cells” or “EG cells” means primordial germ cell derived cells which have the potential to differentiate into all the cell types of body and are as amenable to genetic modification as embryonic stem cells, to the extent that sometimes the distinction between EG cells and ES cells is ignored. “Developmental Biology”, sixth edition, ed. by Scott F. Gilbert, Sinauer Associates, Inc., Publishers, Sunderland, Mass. (2000).

[0041] “Embryonic stem cells” or “ES cells” means cultured cells derived from inner cell mass of early stage embryo, which are amenable to genetic modification and which retain their totipotency and can contribute to all organs of resulting chimeric animal if injected into host embryo. “Developmental Biology”, sixth edition, ed. by Scott F. Gilbert, Sinauer Associates, Inc., Publishers, Sunderland, Mass. (2000).

[0042] As used herein, “fertilization” means the union of male and female gametes during reproduction resulting into formation of zygote, the earliest developmental stage of an embryo.

[0043] “Germ cell development” means the process by which certain cells in the early stage developing embryo differentiate into primordial germ cells.

[0044] “Germ cell migration” means the process by which primordial germ cells, after originating in the extraembryonic mesoderm travel back in the embryo through allantois (precursor of umbilical cord) and continue to migrate through adjacent yolk sac, hindgut, and dorsal mesentery to finally reach the genital ridge (developing gonad). “Developmental Biology”, sixth edition, ed. by Scott F. Gilbert, Sinauer Associates, Inc., Publishers, Sunderland, Mass. (2000).

[0045] “Germ line cell” means any cell, at any stage of differentiation towards mature gametes, including mature gametes.

[0046] “Primordial germ cells” means those cells arising early in the embryonic development that give rise to the spermatogenic lineage via a gonocyte intermediate or female germline via an oogonia intermediate.

[0047] As used herein, the terms nucleic acid or polynucleotide refer to deoxyribonucleotides or ribonucleotides and polymers thereof in either single- or double-stranded form unless indicated otherwise. As such, the terms include RNA and DNA, which can be a gene or a portion thereof, a cDNA, a synthetic polydeoxyribonucleic acid sequence, or the like, and can be single-stranded or double-stranded, as well as a DNA/RNA hybrid. Unless otherwise indicated, a particular nucleic acid sequence also implicitly encompasses conservatively modified variants thereof (e.g. degenerate codon substitutions) and complementary sequences as well as the sequence explicitly indicated. Specifically, degenerate codon substitutions may be achieved by generating sequences in which the third position of one or more selected (or all) codons is substituted with mixed-base and/or deoxyinosine residues (Batzer et al. (1991) Nucleic Acid Res. 19:5081; Ohtsuka et al. (1985) J. Biol. Chem. 260:2605-2608; Rossolini et al. (1994) Mol. Cell. Probes 8:91-98). The term nucleic acid is used interchangeably with gene, cDNA, and mRNA encoded by a gene.

[0048] A “polypeptide” refers generally to peptides and proteins. In certain embodiments the polypeptide may be at least two, three, four, five, six, seven, eight, nine or ten or more amino acids or more or any amount in-between. A peptide is generally considered to be more than fifty amino acids. The terms “fragment,” “derivative” and “homologue” when referring to the polypeptides according to the present invention, means a polypeptide which retains essentially the same biological function or activity as said polypeptide. Such fragments, derivatives and homologues can be chosen based on the ability to retain one or more of the biological activities of the polypeptide. The polypeptides may be recombinant polypeptides, natural polypeptides or synthetic polypeptides.

[0049] “Codon optimization” can be used to optimize sequences for expression in an animal and is defined as modifying a nucleic acid sequence for enhanced expression in the cells of the animal of interest, e.g. swine, by replacing at least one, more than one, or a significant number, of codons of the native sequence with codons that are more frequently or most frequently used in the genes of that animal. Various species exhibit particular bias for certain codons of a particular amino acid. Cas9 can be one of the sequences codon optimized for improved expression.

[0050] In one aspect, polynucleotides comprising nucleic acid fragments of codon-optimized coding regions which may produce RNA, encode polypeptides, or fragments, variants, or derivatives thereof, with the codon usage adapted for optimized expression in the cells of a given animal. These polynucleotides are prepared by incorporating codons preferred for use in the genes of the host of interest into the DNA sequence.

[0051] A “heterologous” nucleic acid molecule is any which is not naturally found next to the adjacent nucleic acid molecule. A heterologous polynucleotide or a heterologous nucleic acid or an exogenous DNA segment refers to a polynucleotide, nucleic acid or DNA segment that originates from a source foreign to the particular host cell, or, if from the same source, is modified from its original form in composition and/or genomic locus by human intervention. A heterologous gene in a host cell includes a gene that is endogenous to the particular host cell, but has been modified or introduced into the host. Thus, the terms refer to a nucleic acid molecule which is foreign or heterologous to the cell, or homologous to the cell but in a position within the host cell nucleic acid in which the element is not ordinarily found.

[0052] A nucleic acid may then be introduced into an animal host cell through the use of a vector, plasmid or construct and the like. A “vector” is any means for the transfer of a nucleic acid into a host cell. Vectors can be single stranded, double stranded or partially double stranded, may have free ends or no free ends, may be DNA, RNA or both. A variety of polynucleotides are known to be useful as vectors. A plasmid is a circular double stranded DNA loop. Referring to one or more expression vectors is meant to refer to one or more vectors comprising necessary regulatory elements for proper expression of the operably linked nucleic acid molecules. A vector may be a replicon to which another DNA segment may be attached so as to bring about the replication of the attached segment. A replicon is any genetic element (e.g., plasmid, phage, cosmid, chromosome, virus) that functions as an autonomous unit of DNA or RNA replication in vivo, i.e., capable of replication under its own control. The term “vector” includes both viral and nonviral means for introducing the nucleic acid into a cell in vitro, ex vivo or in vivo. Viral vectors include but are not limited to adeno-associated viruses, lentiviruses, alphavirus, retrovirus, pox, baculovirus, vaccinia, herpes simplex, Epstein-Barr, rabies virus, and vesicular stomatitis virus. Non-viral vectors include, but are not limited to plasmids, liposomes, electrically charged lipids (cytofectins), DNA- or RNA protein complexes, and biopolymers. In addition to a nucleic acid, a vector may also contain one or more regulatory regions, and/or selectable markers useful in selecting, measuring, and monitoring nucleic acid transfer results (transfer to which tissues, duration of expression, etc.). Transformed cells can be selected, for example, by resistance to antibiotics conferred by genes contained on the plasmids, such as the amp, kan, gpt, neo and hyg genes. The techniques employed to insert such a sequence into the viral vector and make ether alterations in the viral DNA, e.g., to insert linker sequences and the like, are known to one of skill in the art. (See, e.g., Sambrook et al., 2001. Molecular Cloning: A Laboratory Manual, 3^{rd} Edition. Cold Spring Harbor Laboratory Press, Plainview, NY). A “cassette” refers to a segment of DNA that can be inserted into a vector at specific restriction sites. The segment of DNA encodes a polypeptide of interest or produces RNA, and the cassette and restriction sites are designed to ensure insertion of the cassette in the proper reading frame for transcription and translation.

[0053] The nucleic acid molecule may be operably linked to a suitable promoter at the 5′ end and a termination signal and poly(A) signal at the 3′ end. As used herein, the term “operably linked” means that the nucleic acid molecule containing an expression control sequence, e.g., transcription promoter and termination sequences, are situated in a vector or cell such that expression of the polypeptide or RNA produced by the nucleic acid molecule is regulated by the expression control sequence. Methods for cloning and operably linking such sequences are well known in the art. Promoters may direct constitutive expression or tissue preferred expression. Tissue-preferred (sometimes called tissue-specific) promoters can be used to target enhanced transcription and/or expression within a particular cell or tissue. Such promoters express at a higher level in the particular cell region or tissue than in other parts of the cell or tissue and may express primarily in the cell region or tissue. Examples include promoters that secrete to the cell wall, retain expression in the endoplasmic reticulum, or target vacuoles or other cell organelles. Other may direct expression primarily to muscle, neuron, bone, skin, blood or specific organs or cell types. Such promoters may also direct expression in a temporal manner, expressing at a particular stage of development or cycle of the cell. The promoter(s) utilized in one example may be polymerase (pol) I, pol II or pol III promoters. Examples of pol I promoters include the chicken RNA pol I promoter. Examples of pol II promoters include but are not limited to the cytomegalovirus immediate-early (CMV) promoter, the Rous sarcoma virus long terminal repeat (RSV-LTR) promoter, and the simian virus 40 (SV40) immediate-early promoter. Examples of pol III promoters includes U6 and H1 promoters. Inducible promoters may be used such as the metallothionein promoter. Other examples of promoters include, T7 phage promoter, T3 phage promoter, beta-galactosidase promoter, and the Sp6 phage promoter. An example of a DNA having a termination and poly(A) signal is the SV40 late poly(A) region. The use of these commercially available expression vectors and systems are well known in the art. The vector may contain multiple copies of a nucleic acid molecule of interest or a combination of nucleic acid molecules; also multiple vectors may be introduced simultaneously or sequentially into the cell.

[0054] Other components may be included in the vector or in vectors also introduced into the cells, such as polyadenylation sequences, enhancers, signal peptides, inducible elements, introns, translation control sequences or the like. As noted above, selectable markers allowing survival of cells with the vector or other identification of cells having the vector may be used.

[0055] A nucleic acid molecule is introduced into a cell when it is inserted in the cell. A cell has been “transfected” by exogenous or heterologous DNA or RNA when such DNA or RNA has been introduced inside the cell. When referring to integration of a nucleic acid molecule into a cell is meant that the molecule has recombined and become part of the genome.

[0056] The presence of the nucleic acid molecule may be determined by any convenient technique, such as identifying the presence of a marker gene; detecting the presence of the inserted sequence via PCR or the like; detecting expression product from animal cells, tissue or fluids; Northern or Western blot analysis; or any other readily available method.

### Primordial Germ Cell (PGC) Specification

[0057] PGCs are specialized cells that are the precursors of gametes. PGC are responsible for passing on genetic information from parent to offspring through generations in order to ensure survival of a species. These cells are specified very early in development from a subset of mesodermal cells which originate at the primitive streak. Due to their short generation interval and fast developmental timeline, many studies on PGC specification and development have been focused on the mouse model system, with only a few published studies on PGC specification and commitment events in other mammals. Any gene involved PGC may be used according to the invention.

[0058] In the mouse, progenitors of PGCs arise from the posterior region of the post-implantation epiblast. At the onset of gastrulation, a cluster of approximately 40 PGCs arise from bone morphogenetic protein (BMP) signals secreted by neighboring cells. Precursors of PGCs are induced by BMP signaling (BMP2, BMP4, and BMP8b) from cells in the extraembryonic ectoderm (ExE). These BMPs act through SMAD1 and SMAD5 signaling to induce expression of PR domain containing 1 (PRDM1) and PRDM14 in a dose-dependent manner, with the highest levels of BMP occurring in the posterior proximal epiblast. Restriction of PGCs to the posterior epiblast location occurs due to BMP inhibitory signals such as left-right determination factor 1 (LEFTY1), cerberus 1 (CER1), and dickkopf homolog 1 (DKK1), which prevent posteriorization of the anterior epiblast. Activation of PRDM1 in precursor cells as early as E6.25, initiates a cascade of events including the induction of PRDM14 and transcription factor AP2-gamma (TFAP2C) in PGC precursors that lead to PGC specification. Because the PGC are derived from a mesodermal population, PGC precursors also initially express mesodermal transcripts such as homeobox (Hox) genes and brachyury (T). However, after the induction of PRDM1, PRDM14, and TFAP2C, the HOX genes are repressed and pluripotency genes POU5F1, SOX2, and NANOG are expressed.

[0059] After PGCs are specified, PRDM1, PRDM14, and TFAP2C then coordinately form a network which is able to repress the somatic program, induce genome-wide epigenetic reprogramming, and initiate the reacquisition of pluripotency. Each of these three genes has a unique role in accomplishing these three goals. Prdm1 is responsible for repression of the somatic program, although its exact method of action is not clearly understood. Prdm14 is absolutely essential in PGC specification and is involved in epigenetic reprogramming as well as initiating and maintaining pluripotency, even in ESC in culture. Tfap2c is believed to function downstream of Prdm1 and is known to be important for migration of PGCs to the gonad because knockouts show reduced cell number and PGCs fail to migrate. Tfap2c mutants are able to specify the initial PGC population but further germ cell differentiation is impaired, and somatic differentiation is initiated.

[0060] In the pig, progenitors of PGC arise in the caudal third of the embryo scattered around the primitive streak at day 12 of embryonic. By day 13, the progenitors are still in the area of the primitive streak though some have appeared in the extra-embryonic yolk sac wall, forming a cluster of PGCs. These progenitor cells are characterized by continued expression of POU5F1 after the epiblast has ceased its expression of POU5F1. They also express SOX17, and most cells within the cluster also express PRDM1. In cells that express both SOX17 and PRDM1, NANOG expression is also retained from the early epiblast.

[0061] Between E12.5 and E13.5, PGCs exhibit co-expression of a variety of pluripotency and PGC factors: SOX17, PRDM1, NANOG, TFAP2C, and OCT4, as determined by immunohistochemical staining. At this stage of development, porcine PGCs do not express the mesodermal factor T. Surprisingly, PRDM14 expression is weak during this specification period, and appears cytoplasmic at E14. As in mice, the initial PGC cluster (E12) contains few cells (˜60) which soon increase to more than 300 cells by E 15.5. During E14-15, the yolk sac folds under the posterior portion of the embryo to form the ventral wall of the hind gut. The PGCs then become restricted to this area at E15 and can be found in the entire length of the hind gut. After the sharp increase in PGC number, they enter quiescence prior to migration, similar to the mouse system.

[0062] In certain embodiments, the inactivated PGC specification gene is PRDM14, PRDM1, SALL4, IFITM1, DPPA3, DDX4, KITLG, DAZL, DND1, PRMT5, NANOG, AID/AICDA, TIAR/TIAL1, or a combination thereof. Inactivating PGC specification genes encoding proteins with the amino acid sequences listed in Table 1 (SEQ ID NOs: 2, 4, 6, 8, 10, 12, 14, 16, 18, 20, 22, 24, 26, 28, 30, 32, 34, 36, 38, 40, 42, 44, 46, 48, 50, 52, 54, 56, 58, 60, 62, 64, 66, 68, 70, 72, 74, 76, and 78), or sequences with at least 70%, at least 80%, at least 90%, at least 95%, at least 96%, at least 97%, at least 98%, or at least 99% sequence identity to the protein sequences listed in Table 1, may result in the loss of PGC specification and/or the lack of ability for functional spermatogenesis or oogenesis.

TABLE 1

| Gene | Species | Genomic sequence | Protein sequence |
|---|---|---|---|
| PRDM14 | Mus musculus | SEQ ID NO: 1 | SEQ ID NO: 2 |
| | Sus scrofa | SEQ ID NO: 3 | SEQ ID NO: 4 |
| | Bos taurus | SEQ ID NO: 5 | SEQ ID NO: 6 |
| PRDM1 | Mus musculus | SEQ ID NO: 7 | SEQ ID NO: 8 |
| | Sus scrofa | SEQ ID NO: 9 | SEQ ID NO: 10 |
| | Bos taurus | SEQ ID NO: 11 | SEQ ID NO: 12 |
| SALL4 | Mus musculus | SEQ ID NO: 13 | SEQ ID NO: 14 |
| | Sus scrofa | SEQ ID NO: 15 | SEQ ID NO: 16 |
| | Bos taurus | SEQ ID NO: 17 | SEQ ID NO: 18 |
| IFITM1 | Mus musculus | SEQ ID NO: 19 | SEQ ID NO: 20 |
| | Sus scrofa | SEQ ID NO: 21 | SEQ ID NO: 22 |
| | Bos taurus | SEQ ID NO: 23 | SEQ ID NO: 24 |
| DPPA3 | Mus musculus | SEQ ID NO: 25 | SEQ ID NO: 26 |
| | Sus scrofa | SEQ ID NO: 27 | SEQ ID NO: 28 |
| | Bos taurus | SEQ ID NO: 29 | SEQ ID NO: 30 |
| DDX4 | Mus musculus | SEQ ID NO: 31 | SEQ ID NO: 32 |
| | Sus scrofa | SEQ ID NO: 33 | SEQ ID NO: 34 |
| | Bos taurus | SEQ ID NO: 35 | SEQ ID NO: 36 |
| KITLG | Mus musculus | SEQ ID NO: 37 | SEQ ID NO: 38 |
| | Sus scrofa | SEQ ID NO: 39 | SEQ ID NO: 40 |
| | Bos taurus | SEQ ID NO: 41 | SEQ ID NO: 42 |
| DAZL | Mus musculus | SEQ ID NO: 43 | SEQ ID NO: 44 |
| | Sus scrofa | SEQ ID NO: 45 | SEQ ID NO: 46 |
| | Bos taurus | SEQ ID NO: 47 | SEQ ID NO: 48 |
| DND1 | Mus musculus | SEQ ID NO: 49 | SEQ ID NO: 50 |
| | Sus scrofa | SEQ ID NO: 51 | SEQ ID NO: 52 |
| | Bos taurus | SEQ ID NO: 53 | SEQ ID NO: 54 |
| PRMT5 | Mus musculus | SEQ ID NO: 55 | SEQ ID NO: 56 |
| | Sus scrofa | SEQ ID NO: 57 | SEQ ID NO: 58 |
| | Bos taurus | SEQ ID NO: 58 | SEQ ID NO: 60 |
| NANOG | Mus musculus | SEQ ID NO: 61 | SEQ ID NO: 62 |
| | Sus scrofa | SEQ ID NO: 63 | SEQ ID NO: 64 |
| | Bos taurus | SEQ ID NO: 65 | SEQ ID NO: 66 |
| AID/AICDA | Mus musculus | SEQ ID NO: 67 | SEQ ID NO: 68 |
| | Sus scrofa | SEQ ID NO: 69 | SEQ ID NO: 70 |
| | Bos taurus | SEQ ID NO: 71 | SEQ ID NO: 72 |
| TIAR/TIAL1 | Mus musculus | SEQ ID NO: 73 | SEQ ID NO: 74 |
| | Sus scrofa | SEQ ID NO: 75 | SEQ ID NO: 76 |
| | Bos taurus | SEQ ID NO: 77 | SEQ ID NO: 78 |

### PGC Specification Gene Inactivation

[0063] Any method which provides for inactivation of the PGC specification gene may be utilized. The term “inactivation” includes any method that prevents the functional expression of one or more PGC specification genes such that the gene or gene product is unable to exert its known function. Means of gene inactivation include deletions, disruptions of the protein-coding sequence, insertions, additions, mutations, gene silencing (e.g. RNAi) and the like.

[0064] The following is provided by way of example rather than limitation. A guide nucleic acid molecule is one that directs the nuclease to the specific cut site in the genome, whether via use of a binding domain, recognition domains, guide RNAs or other mechanisms. The guide nucleic acid molecule is introduced into the cell under conditions appropriate for operation of the guide nucleic acid molecule in directing cleavage to the target locus. A person of skill in the art will have available a number of methods that may be used, the most common utilizing a nuclease to cleave the target region of the gene, along with sequences which will recognize sequences at the target locus and direct cleavage to the locus. Any nuclease that can cleave the phosphodiester bond of a polynucleotide chain may be used in the methods described here. By way of example without limitation, available systems include those utilizing site specific nucleases (SSN) such as ZFNs (Zinc finger nuclease), (Whyte, J. J. et al. Gene targeting with zinc finger nucleases to produce cloned eGFP knockout pigs. Mol Reprod Dev 78, 2 (2011); Whyte, et al. Cell Biology Symposium: Zinc finger nucleases to create custom-designed modifications in the swine (Sus scrofa) genome. J Anim Sci 90, 1111-1117 (2012)); TALENs (Transcription activator-like effector nucleases) (see, Carlson, D. F. et al. Efficient TALEN-mediated gene knockout in livestock. Proc Natl Acad Sci USA 109, 17382-17387 (2012); Tan, W. et al. Efficient nonmeiotic allele introgression in livestock using custom endonucleases. Proc Natl Acad Sci USA 110, 16526-16531 (2013); Lillico, S. G. et al. Live pigs produced from genome edited zygotes. Scientific reports 3, 2847 (2013)), and the CRISPR (Clustered regularly interspaced short palindromic repeats)-associated (Cas) nuclease system (Hai, T., Teng, F., Guo, R., Li, W. & Zhou, Q. One-step generation of knockout pigs by zygote injection of CRISPR/Cas system. Cell Res 24, 372-375 (2014)) that have permitted editing of animal genomes such as pig genomes with relative ease. The use of recombinases such as FLP/FRT as described in U.S. Pat. No. 6,720,475, or CRE/LOX as described in U.S. Pat. No. 5,658,772, can be utilized to integrate a polynucleotide sequence into a specific chromosomal site. Meganucleases have been used for targeting donor polynucleotides into a specific chromosomal location as described in Puchta et al., PNAS USA 93 (1996) pp. 5055-5060. ZFNs work with proteins or domains of proteins binding to a binding domain having a stabilized structure as a result of use a zinc ion. TALENs utilize domains with repeats of amino acids which can specifically recognize a base pair in a DNA sequence. For a discussion of both systems see Voytas et al. U.S. Pat. No. 8,697,853, incorporated herein by reference in its entirety. These systems utilize enzymes prepared for each target sequence.

[0065] The CRISPR/Cas nuclease system has evolved in archaea and bacteria as an RNA based adaptive immunity system to detect and cleave invading viruses and plasmids. (Horvath, P. & Barrangou, R. CRISPR/Cas, the immune system of bacteria and archaea. Science 327, 167-170 (2010); Wiedenheft, et al. RNA-guided genetic silencing systems in bacteria and archaea. Nature 482, 331-338 (2012)). Unlike ZFNs and TALENs, which require assembly of DNA binding domain (DBD) to direct the nuclease to the target site, the CRISPR/Cas system utilizes RNA as a guide. The CRISPR locus is a distinct class of interspersed short sequence repeats (SSRs) recognized in bacterial genes. The repeats are short elements occurring in clusters that are regularly spaced by unique intervening sequences with a substantially constant length. They were observed as an immunity system in which nucleic acid molecules homologous to virus or plasmid sequences are integrated into the CRISPR loci. The foreign DNA or RNA is targeted and cleaved. The system has been adapted for targeted insertion of a nucleic acid molecule at a defined locus. In general, a CRISPR system is characterized by elements that promote the formation of a CRISPR complex at the site of a target sequence to which a guide sequence is designed to have complementarity, where hybridization between a target sequence and a guide sequence promotes the formation of a CRISPR complex. Full complementarity is not necessarily required, provided there is sufficient complementarity to cause hybridization and promote formation of a CRISPR complex. In the CRISPR system one enzyme, a CRISPR enzyme is used for targeting using short RNA molecules.

[0066] Two basic components are used with the system, a guide RNA and an endonuclease. The guide RNA is endogenous sequence specifying the target site and tracrRNA, needed to bind to the enzyme. The guide sequence provides target specificity and the tracrRNA provides scaffolding properties. These guide sequences are typically about 15 up to 20 to 25 base pairs (bp) that hybridize with the target site and direct binding of a CRISPR complex to a target sequence. A sequence encoding a CRISPR-associated enzyme may be provided on the same or different vectors. Non-limiting examples of Cas proteins include Cas1, Cas1B, Cas2, Cas3, Cas4, Cas5, Cas6, Cas7, Cas8, Cas9 (also known as Csn1 and Csx12), Cas10, Csy1, Csy2, Csy3, Cse1, Cse2, Csc1, Csc2, Csa5, Csn2, Csm2, Csm3, Csm4, Csm5, Csm6, Cmr1, Cmr3, Cmr4, Cmr5, Cmr6, Csb1, Csb2, Csb3, Csx17, Csx14, Csx10, Csx16, CsaX, Csx3, Csx1, Csx15, Csf1, Csf2, Csf3, Csf4, homologs thereof, or modified versions thereof. In one embodiment the enzyme is a type II CRISPR system enzyme and is Cas9 or variants or modifications thereof. These enzymes are known; for example, the amino acid sequence of S. pyogenes Cas9 protein may be found in the SwissProt database under accession number Q99ZW2. The enzyme or Cas9 protein can be used as a nickase or nuclease and cleave one or two strands of DNA. Cas9 has two functional domains, RuvC and HNH and when both are used both strands are cleaved. Cas9 nuclease forms a ribonuclease complex with target CRISPR RNAs (crRNAs) and transactivating RNAs (tracrRNA), and uses the chimeric RNA to target the genomic sequence and induce DSB. The CRISPR/Cas nuclease and other SSN can introduce a targeted double strand break (DSB) in the genomic DNA, which in the presence of a single stranded (SS) DNA oligonucleotide or a double stranded (DS) targeting vector, result in homologous recombination (HR) based alteration of selected nucleotides or KI of transgenes respectively, into the target loci. In another embodiment a SS oligonucleotide having the nucleic acid molecule of interest may be used with Cas9 mRNA and sgRNA to target modification of a particular target gene region. In further embodiments the target gene is complementary to the gRNA sequence and will have a protospacer adjacent motif or PAM sequence. This aids in binding by Cas9. For a discussion of details of the CRISPR/Cas system see Cong et al., U.S. Pat. Nos. 8,932,814; 8,871,445 and 8,906,616, incorporated by reference herein in their entirety.

[0067] Breaks in the genome can be repaired by the non-homologous end joining DNA repair pathway (NHEJ) or by homology directed repair pathway (HDR). NHEJ can disrupt the gene, by causing frame shifts or premature stop codons to occur. HDR is an embodiment that provides for insertion of a nucleic acid molecule that avoids such issues. With a double strand break a DNA repair template is provided in which sequences are provided that have homology to and hybridize with genome sequences flanking the cleavage site (homology arm). In one embodiment the DNA template or flanking sequences are transfected into the cell with the CRISPR/Cas vector.

[0068] Even though HDR-based gene targeting events are extremely rare, the efficiencies can be improved by several orders of magnitude (>1000-fold) by introducing a DSB at the target locus (Moehle, E. A. et al. Targeted gene addition into a specified location in the human genome using designed zinc finger nucleases. Proc Natl Acad Sci USA 104, 3055-3060 (2007)). Following DSB, either a SS oligo, or a DS vector with homology to the ends flanking the DSB, can produce animals with targeted genomic alterations or transgene integrations (Cui, L et al. The permissive effect of zinc deficiency on uroguanylin and inducible nitric oxide synthase gene upregulation in rat intestine induced by interleukin 1alpha is rapidly reversed by zinc repletion. The Journal of Nutrition 133, 51-56 (2003); Meyer, M et al. Gene targeting by homologous recombination in mouse zygotes mediated by zinc-finger nucleases. Proc Natl Acad Sci USA 107, 15022-15026 (2010)).

[0069] A still further example provides for introduction into the animal cell of interfering nucleic acid molecules. For example, double-stranded RNA molecules (dsRNA) may be employed. In this process, in summary, RNA which is double stranded, in part, or completely, is produced based upon the sequence of the target nucleic acid molecule. Specifics of the means of producing the dsRNA may vary as one skilled in the art appreciates, and include, by way of example without intending to be limiting, the approach of Graham et al., U.S. Pat. No. 6,573,099 where two copies of a sequence corresponding to a target sequence is used, or that of Fire et al., U.S. Pat. No. 6,326,193 (both incorporated herein by reference), where the first strand is an RNA sequence corresponding to the target nucleic acid, and the second is one which is complementary to the target sequence, each of which are incorporated herein by reference in their entirety. These strands hybridize with each other to form the inhibiting dsRNA. The strand which corresponds to the target nucleic acid molecule can correspond to all or a portion thereof, as long as a dsRNA is formed. Where a strand is used which is the complement (antisense) of the target nucleic acid is used, it can be complementary to all or a portion of the target nucleic acid molecule, so long as the dsRNA formed interferes with the target nucleic acid molecule. The dsRNA triggers a response in which the RNAse III Dicer enzyme process dsRNA into small interfering RNAs (siRNA) of approximately 21-23 nucleotides, which are formed into a RNA-induced silencing complex RISC which destroys homologous mRNAs. (See, Hammond, S. M., et al., Nature (2000) 404:293-296). Generally, sequences of up to 10 nucleotides 20 nucleotides, 30 nucleotides, 40 nucleotides, 50 nucleotides, 100 nucleotides, 200 nucleotides, 300, 500, 550, 500, 550, or greater and any amount in-between may be used.

[0070] In referring to injection in the context of inserting a nucleic acid or a protein into a cell, it is meant any convenient method of inserting a device into the cell and passage of the nucleic acid molecules or proteins into the cell. By way of example without limitation, this can be accomplished with an injection pipette which may include a syringe holding the nucleic acid molecules or proteins.

### Complementation

[0071] The ablation of endogenous germline may be complemented by a suitable method including blastocyst complementation or embryo-embryo aggregation. In blastocyst complementation, donor stem cells are injected into the host embryo at blastocyst stage, as is the usual technique for generating chimeras. In embryo-embryo aggregation, one blastomere of a 4-cell stage donor embryo is injected into a 4-cell host embryo of a different strain background.

[0072] Recently, blastocyst complementation has become a popular technique to direct cells toward a specific lineage. This technique is coming of use for biomedical applications, as researchers are seeking a way to grow human organs in other species for potential use as transplants. Much evidence has been presented in the mouse model that this technique works, but interspecies chimeras are still in development.

[0073] Blastocyst complementation is also being used to generate interspecies chimeras, with the hope for future human applications. The biomedical field is rapidly developing techniques to attempt generating human organs inside large animals, most notably the pig. Introductory studies using the mouse and rat to determine the feasibility of interspecies chimeras have determined that this technique is possible. Rat-mouse chimeras have been reported, with a rat pancreas generated in a Pdx1-null mouse, and the reverse experiment as well. The first report of human-pig chimeras shows that it is possible to have human iPSC incorporated into a porcine fetus up until E28, albeit at low frequency and low levels of chimerism.

[0074] The methods may be used in any animal. Suitable animals include, but are not limited to, a human, a livestock animal, a companion animal, a lab animal, and a zoological animal. In one embodiment, the subject may be a rodent, e.g. a mouse, a rat, a guinea pig, etc. In another embodiment, the subject may be a livestock animal. Non-limiting examples of suitable livestock animals may include pigs, cows, horses, goats, sheep, llamas and alpacas. In certain embodiments, the animal is a is an ungulate or a ruminant animal. In yet another embodiment, the subject may be a companion animal. Non-limiting examples of companion animals may include pets such as dogs, cats, rabbits, and birds. In some embodiments, the animal is a laboratory animal. Non-limiting examples of a laboratory animal may include rodents, canines, felines, and non-human primates. In certain embodiments, the animal is a rodent. Non-limiting examples of rodents may include mice, rats, guinea pigs, etc. In certain embodiments, the animal is a bovine animal. In certain embodiments, the animal is cattle. In certain embodiments, the animal is a pig.

[0075] Pig is an economically important agricultural animal. Additionally, pigs are coveted for their biomedical applications. Similar to humans and mouse, the pigs are mono-gastric, and as such are playing a dominant role in investigations of nutrient uptake, trafficking and metabolism. (Patterson, et al. The pig as an experimental model for elucidating the mechanisms governing dietary influence on mineral absorption. Experimental biology and medicine 233, 651-664 (2008)). Advances in the field of animal genome editing have included sequencing of pig genome. (Groenen, M. A. et al. Analyses of pig genomes provide insight into porcine demography and evolution. Nature 491, 393-398 (2012)). Taken together, depending on the biological question that needs to be addressed, a suitable pig model is available for investigation. However, until now there has been a lack of incentive for the use of pig as “preferred models”, due to the GM technologies that lag behind the mouse models.

[0076] Much of our knowledge of current human biology has been based on studying a large variety of model species. In order to understand the development, diagnosis, and treatment of human diseases, it is important to have a relevant model species in place. While traditional laboratory model species (e.g. rodents, Drosophila, zebrafish, C. elegans) are informative for determining the function of single genes and proteins, it must be recognized that these model species do not always reflect the complexity of human biology. The domestic pig has become increasingly important as a model species for biomedical research due to its many similarities to humans.

[0077] Physiologically, swine are remarkably similar to humans in regard to gastrointestinal anatomy and function, cardiovasculature, metabolic syndrome, and comparative organ size. Pigs also have a much longer lifespan than other commonly used animal models, giving researchers the opportunity for longer term studies. Additionally, although its unique evolutionary background places it distinct from primates and rodents, transcriptomic analysis has determined that the pig has higher sequence conservation to the human than the mouse does. This similarity to the human genome is also true for protein coding sequences. Combined, these characteristics make pigs a uniquely suitable model for applications of biotechnology and disease modeling for humans, especially as a bridge between traditional rodent models and nonhuman primates.

### Applications

[0078] The presently disclosed techniques can be used to expand the number of progeny that can be generated from any desired donor. The techniques can be used, for example, to facilitate animal breeding. Animals having certain desired traits or characteristics, such as disease resistance, improved fertility and production traits, performance traits, or meat quality traits have long been desired. Traditional breeding processes are capable of producing animals with some specifically desired traits, but these traits are often too time-consuming, costly, and unreliable to develop.

[0079] In one aspect, the donor cells are from an elite animal. By “elite animal” as used herein is meant an animal that is highly valuable in terms of genetic traits in productivity, reproduction, disease resistance, or the like. The elite animal may be a sire or a dam. Given that the germline of the chimeric animal, and thus the progeny produced therefrom, are exclusively derived from the donor, the number of offspring which may be produced by a small selection of the best quality parent animals can be vastly increased. Thus, multiplication of livestock animals, e.g., porcine or bovine, with proven genetic superiority or other desirable traits is possible. The technique ensures that large numbers of animals derived from a particular high-quality sire or dam donor can be produced for use in breeding. The obtained chimeric animal can be bred directly, whether by natural mating, artificial insemination, or by in vitro fertilization (IVF) and/or other artificial reproductive technologies.

[0080] In another aspect, the donor cells may be obtained from an animal or animal line that is difficult to breed or otherwise maintain. A difficult to breed line may include, for example, an animal that is transgenic, immunodeficient, or lacking one or more functional genes (a knock-out animal). Many such animals are difficult to obtain in large number for use in experiments due to this poor breeding performance.

[0081] Multiplication of immunodeficient animals is particularly useful. In one embodiment, the donor cells are from an animal that is immunodeficient. “Immunodeficient,” includes deficiencies in one or more aspects of an animal's native, or endogenous, immune system, e.g. the animal is deficient for one or more types of functioning host immune cells, e.g. deficient for B cell number and/or function, T cell number and/or function, NK cell number and/or function, etc. Immunodeficient mouse models are very useful models for immunology, infectious disease, cancer, and stem cell biology but many are inherently poor breeders.

[0082] The obtained chimeric animals may have an essentially normal phenotype, including satisfactory breeding performance, but will produce progeny comprising the donor genetics. In this way, the animals with poor breeding performance are maintained and additional animals can be easily generated. This will result in many progeny derived from the donor in a short period and enables to ability to breed sufficient numbers of the experimental animals.

### EMBODIMENTS

[0083] The following numbered embodiments also form part of the present disclosure:
[0084] 1. A method for producing a chimeric embryo with donor-derived germ cells, the method comprising: providing a host embryo comprising an inactivated primordial germ cell (PGC) specification gene; and complementing the host embryo with donor cells to yield the chimeric embryo, wherein the germ cells of the chimeric embryo are exclusively derived from the donor.
[0085] 2. The method of embodiment 1, wherein the inactivated PGC specification gene is PRDM14.
[0086] 3. The method of embodiment 1, wherein the inactivated PGC specification gene is PRDM1, SALL4, IFITM1, DPPA3, DDX4, KITLG, DAZL, DND1, PRMT5, NANOG, AICDA, or TIAL1.
[0087] 4. The method of any one of embodiments 1-3, wherein the host embryo is complemented at the blastocyst stage.
[0088] 5. The method of any one of embodiments 1-3, wherein the host embryo is complemented at the 4-cell to 8-cell stage.
[0089] 6. The method of any one of embodiments 1-3, wherein the host embryo is complemented at the 4-cell stage, 6-cell stage, or 8-cell stage.
[0090] 7. The method of any one of embodiments 1-6, wherein the donor cells comprise one or more pluripotent cells.
[0091] 8. The method of embodiment 7, wherein the one or more pluripotent cells comprise embryonic stem cells or induced pluripotent stem cells.
[0092] 9. The method of embodiment 7, wherein the one or more pluripotent cells comprise a blastomere of a 4-cell stage donor embryo.
[0093] 10. The method of any one of embodiments 1-9, wherein the animal is non-human.
[0094] 11. The method of any one of embodiments 1-10, wherein the animal is a mouse.
[0095] 12. The method of any one of embodiments 1-10, wherein the animal is an ungulate, optionally wherein the animal is a ruminant animal.
[0096] 13. The method of any one of embodiments 1-10, wherein the animal is a pig or cattle.
[0097] 14. The method of any one of embodiments 1-13, wherein the inactivation of the PGC specification gene is accomplished by gene editing.
[0098] 15. The method of embodiment 14, wherein the gene editing comprises use of a TALEN, a zinc finger nuclease, or RNA-guided CRISPR-Cas.
[0099] 16. The method of any one of embodiments 1-15, wherein the inactivation of the PGC specification gene is accomplished by injecting a zygote with a Cas protein and a guide RNA that targets the PGC specification gene.
[0100] 17. The method of any one of embodiments 1-16, wherein the donor cells are from an elite animal.
[0101] 18. The method of any one of embodiments 1-16, wherein the donor cells are from an animal with poor breeding performance.
[0102] 19. A chimeric embryo produced by the method of any one of embodiments 1-18.
[0103] 20. The method of any one of embodiments 1-18, further comprising:
[0104] transferring the chimeric embryo into a recipient female animal; and allowing the transferred chimeric embryo to develop to term as a chimeric animal.
[0105] 21. The method of embodiment 20, further comprising: collecting semen from the chimeric animal.
[0106] 22. The method of embodiment 20, further comprising:
[0107] breeding the chimeric animal with a second animal to produce one or more progeny animals.
[0108] 23. The method of embodiment 22, wherein the breeding comprises natural mating, artificial insemination, or in vitro fertilization.
[0109] 24. A method for producing a chimeric animal with donor-derived germ cells by blastocyst complementation, the method comprising:
[0110] injecting a zygote with a Cas protein and a guide RNA that targets the PRDM14 gene or the PRDM1 gene and allowing the zygote to develop into a blastocyst;
[0111] complementing the blastocyst with embryonic stem cells from a donor to yield a chimeric blastocyst, and
[0112] transferring the chimeric blastocyst to the uterus of a female recipient animal and allowing a chimeric animal to develop, wherein the chimeric animal comprises germ cells exclusively derived from the donor.
[0113] 25. A method for producing a chimeric animal with donor-derived germ cells by embryo-embryo aggregation, the method comprising:
[0114] injecting a zygote with a Cas protein and a guide RNA that targets the PRDM14 gene or the PRDM1 gene and allowing the zygote to develop into a 4-cell to 8-cell stage embryo; complementing the embryo with a blastomere from a donor 4-cell stage embryo to yield a chimeric embryo; and
[0115] transferring the chimeric embryo to the oviduct of a female animal and allowing a chimeric animal to develop, wherein the chimeric animal comprises germ cells exclusively derived from the donor.
[0116] 26. The method of embodiment 24 or 25, wherein the animal is non-human.
[0117] 27. The method of embodiment 24 or 25, wherein the animal is a mouse.
[0118] 28. The method of embodiment 24 or 25, wherein the animal is an ungulate, optionally wherein the animal is a ruminant animal.
[0119] 29. The method of embodiment 24 or 25, wherein the animal is a pig or cattle.
[0120] 30. A chimeric animal produced by the method any one of embodiments 24-29.
[0121] 31. A chimeric embryo comprising host cells and donor cells, wherein the host cells comprise an inactivated primordial germ cell (PGC) specification gene, and wherein the donor cells exclusively contribute to the germ cells of the chimeric embryo.
[0122] 32. The chimeric embryo of embodiment 31, wherein the inactivated PGC specification gene is PRDM14.
[0123] 33. The chimeric embryo of embodiment 31, wherein the inactivated PGC specification gene is PRDM1, SALL4, IFITM1, DPPA3, DDX4, KITLG, DAZL, DND1, PRMT5, NANOG, AICDA, or TIAL1.
[0124] 34. The chimeric embryo of any one of embodiments 31-33, wherein the animal is non-human.
[0125] 35. The chimeric embryo of any one of embodiments 31-34, wherein the animal is a mouse.
[0126] 36. The chimeric embryo of any one of embodiments 31-34, wherein the animal is an ungulate, optionally wherein the animal is a ruminant animal.
[0127] 37. The chimeric embryo of any one of embodiments 31-34, wherein the animal is a pig or cattle.
[0128] 38. A chimeric animal developed from the chimeric embryo of any one of embodiments 31-37.

[0129] All references cited herein are incorporated herein by reference. The examples presented are provided by way of illustration and not meant to limit the scope of the invention.

### EXAMPLES

### Example 1: Direction of Pluripotent Cells Toward a Primordial Germ Cell Fate in Chimeric Mouse Embryos

[0130] The approach for this example took advantage of the principles for lineage specification; that is, directing a multipotent cell toward a specific cell fate. For this objective, it was necessary to direct the ESC toward a PGC fate so that they would be fully incorporated into the germline. It was hypothesized that by preventing the wild-type embryo from entering the PGC lineage by knocking out the function of Prdm14, the ESC would have uninhibited access to fill the germ cell niche, establishing a chimera that has exclusively donor-derived germ cells (FIG. 1).

### Generation of Prdm14 Chimeric Mice via Embryo-Embryo Aggregation

[0131] C57BL/6J (referred to as wildtype (WT); The Jackson Laboratory, Bar Harbor, ME) females were superovulated using intraperitoneal injections of 7.5 IU PMSG (pregnant mare's serum gonadotropin; Sigma, St. Louis, MO) followed by 7.5 IU hCG (human chorionic gonadotropin; Sigma, St. Louis, MO) 46 hours later. WT embryos were collected 10-12 hours post mating with WT males using KSOMaa (potassium simplex optimization medium containing amino acids; Zenith Biotech, Guilford, CT) Evolve media containing HEPES (N-2-hydroxyethylpiperazine-N′-2-ethanesulfonic acid; Zenith Biotech, Guilford, CT).

[0132] Zygotes from WT females were moved to FHM handling media (modified KSOM, EMD Millipore; Billerica, MA) and microinjected with a CRISPR guide RNA targeting exon 1 of the Prdm14 gene using 25 ng of Cas9 protein (PNA Bio; Thousand Oaks, CA) and 12.5 ng of guide RNA transcribed in vitro (Ambion MEGAshortscript T7; Austin, TX) and cultured at 37° C. in KSOMaa Evolve (Zenith Biotech; Guilford CT) under 5% oxygen and 5% carbon dioxide.

[0133] Embryos from GFP matings were collected on E1.5 at the 2-cell stage. At 2 days post-coitum (dpc), the zona pellucida was removed from GFP embryos and the four blastomeres were separated using a combination of acidic Tyrode's solution (Sigma; St. Louis, MO) and gentle pipetting. One blastomere from the GFP embryo was injected into the 4-cell stage Prdm14 CRISPR-injected non-GFP embryo. Reconstituted embryos were incubated in 150 mg/mL phytohemagglutinin PHA-L (Sigma; St. Louis, MO) for 20 minutes and returned to culture. Embryos were cultured overnight and transferred into the oviduct of day 0.5 pseudopregnant CD1 (Charles River Laboratories; Frederick, MD) females as described below and allowed to go to term.

### Generation of Prdm14 Chimeric Mice Via Blastocyst Complementation (Stem Cell Injection)

[0134] C57BL/6J-GFP (GFP: green fluorescent protein; The Jackson Laboratory, Bar Harbor, ME) females were superovulated using intraperitoneal injections of 7.5 IU PMSG followed by 7.5 IU hCG 48 hours later. GFP cumulus-oocyte complexes were collected 14-16 hours post-hCG and placed into a 200 μL in vitro fertilization (IVF) drop of high calcium HTF medium (human tubal fluid) containing 0.25 mM reduced glutathione (Sigma; St. Louis, MO). Table 2 shows the composition of high calcium HTF medium.

[0135] Cauda epididymides from ≥8-week old C57BL/6J-GFP males were dissected and gently squeezed to release spermatozoa from the epididymides. Spermatozoa were incubated in TYH (modified Kregs-Ringer bicarvonate medium) containing MBCD (methyl-β-cyclodextrin) at 37° C. under 5% oxygen and 5% carbon dioxide. Table 3 shows the composition of sperm incubation medium (TYH+MBCD). After 1 hour of incubation, 3-5 μL of sperm from the edge of the medium drop were collected and transferred to the IVF drops containing the fresh cumulus-oocyte complexes. Fertilization dishes were then incubated at 37° C. under 5% oxygen and 5% carbon dioxide for 3.25-4 hours.

[0136] Presumptive zygotes were microinjected with a CRISPR guide targeting exon 1 of the Prdm14 gene using 25 ng of Cas9 protein (PNA Bio; Thousand Oaks, CA) and 12.5 ng of guide RNA and cultured at 37° C. in KSOMaa Evolve (Zenith Biotech; Guilford, CT) under 5% oxygen and 5% carbon dioxide until blastocyst stage 4 days later. At blastocyst stage, 10-12 embryonic stem cells (R1 control or Cwc15^{-/-} AD7 clone experimental cell line) were injected into the blastocoele of each GFP blastocyst. These blastocysts were transferred into the uterus of day 2.5 pseudopregnant CD1 (Charles River Laboratories; Frederick, MD) females and pregnancies were allowed to go to term.

TABLE 2

| Reagent Name | mg/100 ml |
|---|---|
| NaCl | 593.8 |
| KCl | 35.0 |
| MgSO₄•7H₂O | 4.9 |
| KH₂PO₄ | 5.4 |
| CaCl₂•2H₂O | 75.5 |
| NaHCO₃ | 210.0 |
| Glucose | 50.0 |
| Na-lactate (ml) | 0.34 |
| Na-Pyruvate | 3.7 |
| Penicillin G | 7.5 |
| Streptomycin | 5.0 |
| BSA (Fraction V, Fatty Acid-Free) | 400.0 |
| Phenol Red (0.5% solution) | 0.04 (ml) |

TABLE 3

| Reagent Name | mg/100 ml |
|---|---|
| NaCl | 697.6 |
| KCl | 35.6 |
| MgSO₄•7H₂O | 29.3 |
| KH₂PO₄ | 16.2 |
| NaHCO₃ | 210.6 |
| Na-Pyruvate | 5.5 |
| Glucose | 100.0 |
| CaCl₂•2H₂O | 25.1 |
| Methyl-β-cyclodextrin | 98.3 |
| Penicillin G | 7.5 |
| Streptomycin | 5.0 |
| Polyvinylalcohol | 100.0 |

### Stem Cell Culture

[0137] Mouse stem cells for blastocyst injection were cultured in a standard embryonic stem cell culture consisting of 80% DMEM/F-12 (Dulbecco's Modified Eagle Medium; Gibco, Grand Island, NY), 20% fetal calf serum (Atlanta Biologicals; Flowery Branch, GA), 2 mM L-alanyl-L-glutamine dipeptide (Gibco; Grand Island, NY), 0.1 mM non-essential amino acids (Gibco; Grand Island, NY) 1 mM sodium pyruvate (HyClone; Pittsburgh, PA), 0.02 mM β-mercaptoethanol (Gibco; Grand Island, NY), and 1000 U/ml LIF (Leukemia Inhibitory Factor; EMID Millipore, Billerica, MA). Stem cells were passaged every 2-3 days using 0.25% trypsin-EDTA (ethylenediaminetetraacetic acid; Gibco, Grand Island, NY).

Embryo Transfer into Recipient Females

[0138] Embryo transfer was performed on either day 0.5 or day 2.5 pseudopregnant CD1 (Charles River Laboratories; Frederick, MD) females, depending on the stage of embryo development. Embryos up to morula stage were transferred into the oviduct of day 0.5 pseudopregnant females and embryos at blastocyst stage were transferred into the uterine horn of day 2.5 pseudopregnant females.

[0139] Recipients were weighed using a scale (Sartorius BP610, Sigma; St. Louis, MO) to determine dosage for buprenorphine analgesic (Par Pharmaceuticals; Spring Valley, NY). Buprenorphine was administered subcutaneously at 0.1 mg/kg of body weight. The animal was then moved to the induction chamber of the SomnoSuite Small Animal Anesthesia System (Kent Scientific; Torrington, CT) and induced at a flow rate of 250 mL/min and a concentration of 3.0% isoflurane (VetOne; Boise, Idaho) until the mouse was completely limp. After induction, the mouse was moved to a warming plate and a nose cone placed over its nose. The flow rate was reduced to 200 mL/min with a concentration of 2.0-2.2% isoflurane for the remainder of the procedure. The area just below the distal end of the rib cage down to the top of the knee was shaved on either side of the mouse. The shaved area extended from the dorsal-ventral boundary to the spine. The shaved surgical area was then treated with betadine using a circular scrubbing motion from the central area to the outer edge, and then rinsed with 70% ethanol in the same manner. Eye gel (CLC Medica; Waterdown, ON, Canada) was placed onto the eyes of the animal to reduce drying during the procedure.

[0140] Using a stereomicroscope, an initial incision was made roughly ⅓ of the way distally from the ribcage and ⅓ of the way ventrally from the spine. A second incision through the fat and muscle layer was made and the ovarian fat pad located. The ovary and cranial end of the uterine horn was pulled outside the body cavity and placed onto sterile gauze. For oviductal transfer, a small cut was made to the oviduct cranial to the swollen ampulla and 10-20 embryos were transferred using a glass pipette, as well as an air bubble to prevent backflow of embryos out of the oviduct. For uterine transfer, a hole was made in the cranial end of the uterine horn using a 26-gauge needle and 10-15 blastocyst transferred. Once the transfer was complete, the reproductive tract was guided back into the body cavity. The muscle incision was closed using one Halsted suture (Ethicon; Cincinnati, OH) and skin stapled (Roboz; Gaithersburg, MD).

[0141] After surgery, mice were placed in a new cage that was pre-warmed at 37° C. until the animal recovered and moved freely. Staples were removed after 10 days and the mice were weighed to determine pregnancy status.

Production of Offspring from Chimeric Animals

[0142] To confirm the phenotype of founder chimeras, all founder mice were grown to puberty (5-8 weeks) and then bred with WT animals (in case of embryo-embryo aggregation founders) or with GFP animals (in case of blastocyst complementation founders). These pregnancies were taken to term to generate F1 progeny. The resulting offspring were analyzed for GFP expression. All GFP animals were photographed using a 500 nm emission filter with the NIGHTSEA™ dual fluorescent protein excitation light (Electron Microscopy Sciences; Hatfield, PA) 2-5 days after birth, and WT pups of the same age were photographed as controls under the same lighting conditions. Where time did not permit pregnancies to go to term, females were sacrificed at E1.5 and 2-cell embryos were flushed from the oviducts and cultured in KSOMaa Evolve (Zenith Biotech; Guilford, CT—check location) at 37° C. under 5% oxygen and 5% carbon dioxide until blastocyst stage when they were imaged under a microscope to determine GFP status.

Aggregation of GFP Blastomere with PRDM14^{-/-} null embryos Can Generate Chimeric Mice

[0143] Blastomeres from GFP embryos were aggregated with putative Prdm14^{-/-} mouse embryos. Prior to performing an embryo transfer, embryos were cultured to the blastocyst stage and analyzed for GFP expression. Every embryo showed chimeric GFP expression, indicating that the aggregation was successful and the embryos were capable of developing to the blastocyst stage (FIG. 2).

[0144] For embryo transfer, the aggregated embryos were transferred the day after aggregation (8-cell to morula stage) to 0.5 dpc pseudopregnant females and pups were born approximately 20 days later. Upon birth, animals were analyzed for GFP expression. From three litters 2 true chimeras were generated, demonstrating that the aggregation was successful due to the appearance of patchy expression of GFP on the individual (FIG. 3). Seven other animals were generated that were 100% GFP-expressing, indicating that the donor blastomere was responsible for giving rise to the entire mouse, as seen from GFP expression externally. Table 4 is a summary of generation of chimeric founders (F0) from embryo aggregations.

TABLE 4

| | | | Percentage |
|---|---|---|---|
| Replicate | # Chimeras | Litter Size | Chimeric |
| 1 | 1 | 7 | 14.29% |
| 2 | 1 | 9 | 11.11% |
| Total | 2 | 16 | 12.50% |

Founder Chimeric Individuals of Embryo-Embryo Aggregations have Germline Originating from Donor Blastomeres

[0145] The founder animals from embryo-embryo aggregations were then raised until puberty (5-8 weeks), when they were mated with WT individuals. This mating was performed to determine if the germ cells of the founder animals arose completely from the GFP donor blastomere as expected. If the germ cells were all generated from the GFP donor embryo, then after mating, subsequent offspring should all be GFP positive, indicating 100% occupation of the germline by the GFP embryo donor lineage. Each founder individual (including those founders assessed to be 100% GFP) was mated to produce at least 1 litter for analysis. Across all litters, every F1 pup born was 100% GFP positive, indicating that all germ cells from the chimeric parent were of donor origin. Table 5 is a summary of GFP offspring from founder chimeric individuals (F₁).

TABLE 5

| Parent ID | % Chimerism | # GFP Pups | # Total Pups | Percentage |
|---|---|---|---|---|
| 1 | 50 | 16 | 16 | 100 |
| 2 | >90 | 19 | 19 | 100 |
| 3 | >90 | 8 | 8 | 100 |
| 4 | >90 | 8 | 8 | 100 |
| 5 | >90 | 9 | 9 | 100 |
| 6 | >90 | 8 | 8 | 100 |

Blastocyst Complementation Generates Chimeras from R1 ESC

[0146] After delivery by the surrogate recipient mother, 3 founder animals were generated from embryos that were injected with the robust R1 control stem cell line. In this experiment, the host embryo was GFP-expressing while the donor stem cells were not. This was the opposite expression pattern as the previous embryo-embryo aggregation experiment. However, founder animals still retained the classic look of a chimera, with a patchy coat including GFP positive and GFP negative areas (FIG. 4).

R1 Founder Chimeras have Germline Originating from ESC Background

[0147] The founder animals from blastocyst complementations using R1 control ESC were raised to puberty and then mated to WT mice. In this experiment, the donor R1 stem cells did not express GFP but were injected into a host embryo that did express GFP. Therefore, if the R1 stem cells contributed to the germ cell lineage, they would not express GFP, and resulting offspring from mating to a WT individual should also be GFP negative. Each founder animal was mated to produce at least 3 litters. Each litter produced by a founder animal consisted of pups that were all GFP-negative, indicating that the germ cells from their founder parent were 100% from R1 stem cell origin (FIG. 5). Table 6 is a summary of mating results of founder R1 chimeras with WT females.

TABLE 6

| Mouse ID | Sex | Mate | Litter Birthdate | Litter Size | Germline Origin |
|---|---|---|---|---|---|
| 1R1 | M | C57BL/6J | Jul. 11, 2017 | 10 | R1 ESC |
| | | C57BL/6J | Aug. 4, 2017 | 9 | |
| | | CD1 | Aug. 9, 2017 | 8 | |
| | | CD1 | Sep. 24, 2017 | 7 | |
| 2R1 | M | C57BL/6J | Jul. 10, 2017 | 11 | R1 ESC |
| | | C57BL/6J | Aug. 3, 2017 | 5 | |
| | | CD1 | Aug. 8, 2017 | 3 | |
| | | C57BL/6J | Aug. 28, 2017 | 11 | |
| 3R1 | M | C57BL/6J | Sep. 19, 2017 | 10 | R1 ESC |
| | | C57BL/6J | Sep. 26, 2017 | 6 | |

Cwc15^{-/-} Founder Animals Show Lack of Chimerism and Cwc15^{-/-} ESC do not Contribute to the Germline

[0148] Blastocyst complementation was also performed using ESC that were mutant for Cwc15 (Cwc15^{-/-}). This stem cell line was chosen because previous experience in our lab with this line generated chimeras quite easily but none of these were germline chimeras. It was therefore decided that the Cwc15^{-/-} line would be an ideal candidate to determine if previously germline-incompetent ESC could be pushed toward occupation of the germline once endogenous PGC competition was removed. Unfortunately, the blastocyst complementation approach yielded only 1 visible chimera, which died at 12 weeks of age prior to siring a litter. The other founder animals showed low contribution by ESC, and did not yield any visible chimeras. Instead, all pups produced from this experiment were almost entirely GFP positive, indicating that the offspring were derived solely from the host embryo, with little to no contribution by the Cwc15^{-/-} ESC. A total of 5 animals were produced, with only 2 showing any sign of contribution by the stem cells (≤5% GFP negative). One of the limited chimeric animals however was phenotypically female, indicating that the ESC did not contribute to her reproductive system, as the ESC were karyotypically XY, and therefore should only give rise to male offspring if incorporated into the reproductive tract during development. Images of the founder animals are shown in FIG. 6. Table 7 is a summary of mating results of founder CWC15^{-/-} chimeras with WT mates. An asterisk indicates the one visible chimera that died at 12 weeks of age.

TABLE 7

| Mouse ID | Sex | Mate | Litter Birthdate | Litter Size | Germline Origin |
|---|---|---|---|---|---|
| 1CWC | F | C57BL/6J | Oct. 6, 2017 | 3 | Host Embryo |
| | | | Nov. 16, 2017 | 4 | Host Embryo |
| 2CWC | M | C57BL/6J | Dec. 2, 2017 | 7 | Host Embryo |
| 3CWC | M | C57BL/6J | Oct. 17, 2017 | 8 | Host Embryo |
| | | | Nov. 19, 2017 | 8 | Host Embryo |
| 4CWC | F | C57BL/6J | Oct. 2, 2017 | 9 | Host Embryo |
| | | | Nov. 19, 2017 | 4 | Host Embryo |
| 5CWC* | M | C57BL/6J | N/A | N/A | N/A |

### Discussion

[0149] In this example, we sought to determine if ESC could be preferentially biased toward a germline fate by eliminating endogenous PGC in the host embryo. To accomplish this, Prdm14 was knocked out in a host embryo that was then aggregated with either another WT embryo or with ESC. Previously, our lab obtained results from a chimera experiment in which it was possible to generate chimeras from the Cwc15^{-/-} ESC line. However, none of the chimeras produced showed germline transmission, as offspring from these chimeras were all wild-type. This led to an important experimental question: were the stem cells simply unable to contribute to the germline and therefore not fully competent, or were the stem cells being outcompeted by the endogenous germ cell program? As evidenced by this example, the answer may comprise a bit of both explanations.

[0150] It is already known that stem cells are able to rescue a knockout phenotype when introduced into a mutant blastocyst. In fact, this has been reported numerous times with researchers targeting genes important for whole organ generation, such as Pdx1 for the pancreas and Nkx2.5 for the heart. So far, blastocyst complementation (the process of injecting stem cells into a genetically modified embryo) has been used in the mouse to rescue the function of Runx2 (Chubb, Oh et al. 2017), Nkx2.5 (Sturzu, Rajarajan et al. 2015), Oct4 (Le Bin, Munoz-Descalzo et al. 2014), Sall1 (Usui, Kobayashi et al. 2012), Rag2 (Chen, Lansford et al. 1993), Pdx1 (Kobayashi, Yamaguchi et al. 2010, Kobayashi, Kato-Itoh et al. 2015), and Id1/2/3 (Fraidenraich, Stillwell et al. 2004), among countless others. However, blastocyst complementation and the rescue of the phenotype has not been shown in the reproductive system to date. This example is the first step in generating a rescue phenotype for primordial germ cells via blastocyst complementation.

[0151] In addition to providing evidence that ESC can rescue a knockout PGC phenotype, this study provides a foundation for generating chimeras from ESC that were previously unable to show germline transmission. While the robust R1 ESC line generated chimeras easily, the Cwc15^{-/-} line did not, which was unexpected as chimeras had been previously produced by our group. This may be explained by a change in experimental methods between the two attempts. Previously, our chimeras were generated by collection of embryos at the blastocyst stage, injection of 10-12 stem cells into the blastocoele, and immediately transferred back into the surrogate mother. Due to the nature of this experiment and the need for CRISPR/Cas9 injection, embryos were cultured from zygote stage to blastocyst stage, a time spanning 4 days. After injection of ESC into the blastocyst, embryos were allowed to recover for 1-2 hours. This combination of experimental conditions could explain the decrease in developmental potential of the whole embryos. The use of blastocyst complementation may also explain the low derivation of pups, as the embryos were manipulated twice.

[0152] In addition to not generating chimeras efficiently, of those that were produced, the degree of chimerism was quite low and there was little to no contribution by the Cwc15^{-/-} ESC to the whole animal. Despite the low degree of chimerism seen externally, it was still possible however unlikely that the germ cell population was generated by the Cwc15^{-/-} cells so the founder animals were mated to determine the status of the germ cell lineage. As expected, offspring generated from these matings were entirely GFP positive, indicating a lack of contribution to the germline by the Cwc15^{-/-} ESC, as in this chimera experiment the host embryo had GFP expression while the donor ESC did not.

[0153] Despite the lack of contribution to the germline by the Cwc15^{-/-} ESC, it may still be possible to use this technique to generate germline competent chimeras. Additional ESC lines should be tested to generate animals with a higher degree of chimerism than were produced in this example. Producing founders with a high degree of chimerism is a critical first step in determining if ESC can contribute to the germline. Without that criterion met, this study did not have a good baseline from which to determine germline competence of the Cwc15^{-/-} ESC.

[0154] The present chimeric mouse study in which embryonic stem cells were directed toward the germ cell lineage provides another approach to generating germline chimeras. The mouse ESC field has been plagued with cells that are either developmentally incompetent for PGC or are outcompeted by the endogenous PGC. This study provides a useful mechanism to overcome the germline transmission barrier so that the field can continue to move forward and characterize the function of genes, the modeling of human disease, and the biology of reproduction.

### Example 2: Expression of Germline-Specific Genes in the Early Porcine Embryo

[0155] Because of its role in both PGC specification and maintenance of pluripotency in the mouse, and its expression in human ESC, investigation of the role of PRDM14 in a non-rodent “bridge model” is warranted. While the pig genome has been sequenced, not all genes have been annotated and many annotated genes have yet to have their functions described. In order to determine the function of PRDM14 in the pig, it was necessary to first determine its normal expression profile at similar developmental time points and locations as are found in the mouse.

[0156] Along with determining the expression of PRDM14 at varying time points in early pig development, several other genes of interest were also chosen for analysis. There were 4 groupings of genes to consider: PGC-related genes (PRDM1 and TFAP2C), genes involved in epigenetic modifications (CARM1, TET1, and TET2), pluripotency genes (POU5F1, SOX2, NANOG, and ESRRB), and germ cell markers (DDX4, DAZL, and STRA8). These groups of genes were chosen based on known information about their function in the mouse system, as well as interest in how genes that are associated with PRDM14 may be functioning at these developmental time points.

### Collection of In Vivo Embryos

[0157] A cohort of gilts were synchronized by oral administration of progesterone analog REGU-MATE® (0.22% altrenogest solution, 2.2 mg/mL) starting from day 15 after a gilt showed behavioral heat. Animals were given 22 mg (10 mL) REGU-MATE® once daily via a drench gun for a minimum of 6 days prior to withdrawal. Approximately 5-7 days after REGU-MATE® withdrawal, gilts in standing estrus were bred 2-3 times via artificial insemination. Semen for AI was provided by Genus PIC in individual doses. Animals were sacrificed based on the stage of embryo desired, as shown in Table 8.

TABLE 8

| Developmental Stage | Day euthanized after breeding |
|---|---|
| Zygote | 1 |
| 2-cell | 2 |
| 4-cell | 3 |
| Morula | 4 |
| Blastocyst | 6 |
| e26 | 26 |

[0158] Reproductive tracts were removed from the females and flushed via 18 gauge needle and syringe using 30-35 mL warmed Dulbecco's Modified Eagle Medium (DMEM, Gibco; Grand Island, NY). Depending upon the stage of development, either the oviduct (zygote and 2-cell), uterine horns (blastocyst), or both (4-cell and morula) were flushed. For embryonic day (E) 26 samples, fetuses were carefully removed from the reproductive tract inside a laminar flow hood and the gonads were dissected for collection. All embryos were then immediately collected for RNA. Gonads from E26 fetuses were snap frozen in liquid nitrogen prior to RNA extraction.

RNA Collection and cDNA Synthesis

[0159] RNA from various stage embryos was collected using the DYNABEADS™ mRNA Purification kit according to manufacturer's instructions (ThermoFisher; Waltham, MA) into a final volume of 10 μL. First, the zona pellucida of each embryo was removed using acidic Tyrode's solution (Sigma; St. Louis, MO) for 2-3 minutes until the zona was completely dissolved. For embryos from developmental stages zygote through morula, 2-3 embryos were pooled for RNA collection to ensure enough RNA to process for PCR. Blastocysts were harvested individually based on evidence from previous publications (Park, Jeong et al. 2012). For E26 gonad samples, RNA was extracted using the RNeasy Mini Kit according to manufacturer's instructions (Qiagen; Hilden, Germany). Briefly, the sample was ground using a tenbroeck homogenizer that was pre-chilled in liquid nitrogen. The sample was then passed through a 20-gauge needle before proceeding with the RNeasy kit, and eluted in a final volume of 30 μL.

[0160] cDNA was then synthesized via the oligo(dT) method using the SuperScript™ IV First-Strand Synthesis System according to manufacturer's instructions (ThermoFisher, Waltham, MA). Using a final volume of 20 μL, synthesis was carried out at 50° C. for 15 minutes and the reverse transcription reaction was terminated by incubating at 80° C. for 10 minutes.

### Droplet Digital™ PCR

[0161] PCR to identify expression of genes of interest was performed using the Bio-Rad QX200 DROPLET DIGITAL™ PCR system (ddPCR™) according to manufacturer's recommendations (Hercules, CA). In this system, a single PCR reaction is partitioned into thousands of reactions by placement inside of oil droplets which are amplified and quantitated individually. This allows for quantitative analysis of samples with low starting material or copy number, while giving thousands of data points for a single sample. This system also provides absolute measurement of copy number without the need for running standard curves.

[0162] For each sample, a 22 μL reaction using ddPCR™ EvaGreen Supermix was loaded into a 96-well plate using the specific primers listed below. The plate was loaded into the QX200™ Automated Droplet Generator (Bio-Rad; Hercules, CA) where the sample was fractionated into 12,000-20,000 individual droplets. After droplet generation, samples were amplified using the C1000 TOUCH™ Thermal Cycler (Bio-Rad; Hercules, CA) using the following conditions: 95° C. for 10 minutes followed by 40 cycles of 94° C. for 30 sec and 58° C. for 1 min, and a final signal stabilization step of 98° C. for 10 minutes. After amplification, the plate was transferred to the QX200™ Droplet Reader for reading and analysis of the droplets using the absolute quantification setting on the machine. Primer sequences used for ddPCR™ are shown in Table 9.

TABLE 9

| Gene | Primer |
|---|---|
| RPS18 | F: 5′-GGCTACCACATCCAAGGAAG-3′ (SEQ ID NO: 79) |
| | R: 5′-TCCAATGGATCCTCGCGGAA-3′ (SEQ ID NO: 80) |
| PRDM14 | F: 5′-GAAGTCAAGACCCACGGAGA-3′ (SEQ ID NO: 81) |
| | R: 5′-AGTTCCCAGCACCTCCTTTT-3′ (SEQ ID NO: 82) |
| PRDM1 | F: 5′-TGTGGGTACGACCTTGGCTG-3′ (SEQ ID NO: 83) |
| | R: 5′-CATATCCGCGTCCTCCATGT-3′ (SEQ ID NO: 84) |
| CARM1 | F: 5′-ACCACACGGACTTCAAGGAC-3′ (SEQ ID NO: 85) |
| | R: 5′-CGTAGATCTTCCTCGCTCCA-3′ (SEQ ID NO: 86) |
| TFAP2C | F: 5′-TCGTGCTCTGACCTTGAAGT-3′ (SEQ ID NO: 87) |
| | R: 5′-CTCTTGCCATCTCCTTGTGC-3′ (SEQ ID NO: 88) |
| TET1 | F: 5′-AGGCGGCCGACCAAAAC-3′ (SEQ ID NO: 89) |
| | R: 5′-GGCACGAGGAACAGAGTCAT-3′ (SEQ ID NO: 90) |
| TET2 | F: 5′-AGCTCACCGAAACACTGAGG-3′ (SEQ ID NO: 91) |
| | R: 5′-CAGGCACAGGTTCTCTCTTCA-3′ (SEQ ID NO: 92) |
| ESRRB | F: 5′-GCCCGTACCTGAGCTTACAG-3′ (SEQ ID NO: 93) |
| | R: 5′-AGGCATGGCGTAGAGTTTGT-3′ (SEQ ID NO: 94) |
| STRA8 | F: 5′-ATGTGGCAAGTTTCCTGGAC-3′ (SEQ ID NO: 95) |
| | R: 5′-GAAACTTCTCCTCGGGCTTT-3′ (SEQ ID NO: 96) |
| DAZL | F: 5′-CCTCCAACCATGATGAATCC-3′ (SEQ ID NO: 97) |
| | R: 5′-ACACAGGCAGCTGATAACCA-3′ (SEQ ID NO: 98) |
| DDX4 | F: 5′-GAGAGGCGGCTTTCAAGATG-3′ (SEQ ID NO: 99) |
| | R: 5′-TAACCACCTCGTCCACTTCC-3′ (SEQ ID NO: 100) |
| SOX2 | F: 5′-CCTACGGGACATGATCAGCA-3′ (SEQ ID NO: 101) |
| | R: 5′-CTCCAGTTCACTGTCCGGC-3′ (SEQ ID NO: 102) |
| NANOG | F: 5′-GGTTTATGGGCCTGAAGAAA-3′ (SEQ ID NO: 103) |
| | R: 5′-GATCCATGGAGGAAGGAAGA-3′ (SEQ ID NO: 104) |
| POU5F1 | F: 5′-GGGTTCTCTTTGGGAAGGTGT-3′ (SEQ ID NO: 105) |
| | R: 5′-TGCCTTGCATATCTCCTGCA-3′ (SEQ ID NO: 106) |

### Statistical Analysis

[0163] Transcript copy number for each target gene at each developmental stage was normalized to an internal reference (40S Ribosomal protein S18; RPS18) corresponding to the appropriate developmental stage to correct for differing amounts of starting RNA. The following equation was used for normalization of each target gene: mRNA level=(Transcript copy number)_{target}/(Transcript copy number)_{RPS18}. The data were log 2-transformed prior to analysis by ANOVA using the MIXED models procedure of SAS (SAS Institute; Cary, NC) and differences between the developmental stages were examined using the test of least significant difference (PDIFF). A significance level of p<0.05 was used to determine significance. The data are presented relative to the earliest embryonic stage examined for each gene, which was expected to have the lowest level of expression among developmental stages.

### Pluripotency Genes are Upregulated in the Early Embryo and in the E26 Fetal Gonad

[0164] Pluripotency genes POU5F1, SOX2, NANOG, and ESRRB were chosen for inclusion in this study to serve as positive controls for early embryo expression, and to determine if they were also characteristic markers of the PGC population at E26. Until recently, POU5F1 and NANOG were some of the only markers used to identify PGCs during porcine fetal development due to the lack of knowledge regarding PGC signaling and specification pathways. These data show a similar pattern of POU5F1 and NANOG: expression at all stages of development analyzed with higher expression in the fetal gonad than in the preimplantation embryo (FIG. 7). As expected, ESRRB is also upregulated in PGC at E26, as well as in the 4-cell to blastocyst stages of the preimplantation embryo. SOX2 however showed diminished expression throughout development when compared to expression levels at the zygote stage (FIG. 8).

### Primordial Germ Cell-Related Genes Show Little Expression in the Early Embryo

[0165] In order to determine if the genes important for germ cell specification in the mouse are also expressed at key time points in the pig, we chose for analysis the three PGC-related genes that are necessary and sufficient for mouse PGC specification: PRDM1, PRDM14, and TFAP2C. PRDM1 and PRDM14 showed differential expression across the 6 stages of development analyzed, with reduced expression as development progresses (FIG. 9). TFAP2C showed no significant pattern of expression across developmental time points (FIG. 10).

### Germ Cell Markers are not Expressed in the Early Embryo

[0166] DAZL, VASA, and STRA8 are all markers of the germ cell population. Unlike the other two genes, STRA8 is restricted to the post-natal male lineage. In this experiment, we included germ cell markers in the study to determine if their expression was limited to the germ cell population, or if there was some earlier expression in pluripotent cells of the preimplantation embryo. DAZL and VASA both showed high expression at the zygote stage, with tapering levels as development continued (FIG. 11). DAZL in particular showed an increased level of expression at the E26 time point, indicative of its role in the pre-natal germ cell population. STRA8 transcript levels were low across all time points and this gene did not exhibit any significant trends in expression across time points (FIG. 12).

### Genes Involved in Epigenetic Reprogramming are Upregulated During Periods of Genome-Wide Demethylation

[0167] The mammalian embryo undergoes two main rounds of genome-wide DNA methylation reprogramming: in the early preimplantation embryo and in PGC. Therefore, we chose to investigate three factors involved in DNA methylation reprogramming that have also been shown to interact with PRDM14 in other species. Of the genes chosen for analysis, CARM1 and TET1 were both upregulated in E26 gonads (FIG. 13). In contrast, TET2 showed highest expression at the zygote stage (FIG. 14). All three of these genes showed the highest level of expression at one of the two developmental time points where epigenetic marks are being erased genome-wide, indicating a positive correlation with this process.

### Discussion

[0168] The above experiment describes for the first time in the porcine system the expression pattern of several PGC, germ cell, and epigenetic markers in the preimplantation embryo. The genes chosen for analysis in this experiment were chosen based on their proposed role within the germ cell program or their association with the major gene of interest, PRDM14.

[0169] The pluripotency markers POU5F1 and NANOG showed increasing expression as the embryo continued to develop, with highest expression levels at E26. This is likely due to an increase in the number of cells of the embryo through blastocyst stage, as well as very high expression in the pluripotent PGCs that reached the genital ridge by E26. SOX2 and ESRRB did not have this same trend for increased expression at the E26 stage. It is possible that the lower expression at E26 of these factors is caused by a dilution effect based on the increased number of cells at this stage of development, or lower overall expression as compared to POU5F1 and NANOG. This same effect could be true for several other factors that were expected to be highly expressed in the genital ridge (PRDM14, PRDM1, DAZL, VASA).

[0170] The PGC marker PRDM1 showed highest expression at the zygote stage. This indicates that there was little to no expression as development occurred, at least through blastocyst stage. In the pig, PRDM1 has been shown to be expressed in the PGC and prespermatogenesis population of cells (Petkov, Marks et al. 2011, Kakiuchi, Tsuda et al. 2014, Kobayashi, Zhang et al. 2017). Kobayashi et al found that it had higher expression than PRDM14 in the PGC population of both pigs and humans, so it is expected that there would be some expression at E26 in this study. Again, dilution of the effect due to large number of cells in the gonad at this stage may account for the reduced effect seen graphically. In the pig, PRDM1 has 7 transcript variants to examine. The primers used here detected variants X2 and X7, which are two of the three longest transcript variants produced. It is therefore possible that amplification of the other 5 variants would result in some expression in the early porcine embryo. Currently it is unknown which variants are expressed in the germ cell lineage in pigs, because PRDM1 is also expressed in other tissues of the body, as evidenced in the mouse (Mould, Morgan et al. 2015, Ahmed, Elias et al. 2016, Bankoti, Ogawa et al. 2017). However, this same primer set showed amplification of message within the whole fetal gonad, indicating it was appropriate for use in this study.

[0171] PRDM14 also had low expression throughout early embryo development and even at E26 (Kobayashi, Zhang et al. 2017). While TFAP2C expression is low in this experiment, TFAP2C may be constitutively expressed and may not be upregulated at any specific time point examined. In the mouse system, Tfap2c is important for specification of the trophectoderm lineage during the morula to blastocyst transition, as well as placental development (Auman, Nottoli et al. 2002, Winger, Huang et al. 2006, Choi, Carey et al. 2012, Cao, Carey et al. 2015). However, this increase in expression in the preimplantation embryo was not seen in this pig study.

[0172] Three germ cell markers that identify pre- and post-natal germ cells were included for analysis—DAZL, VASA, and STRA8. Similar to PGC markers, these were chosen because they are indicative of cells in a pluripotent pathway and may therefore have shown expression in the early embryo. Both DAZL and VASA showed highest expression at the zygote stage with little to no expression after that time period. DAZL in particular showed another increase of expression at E26, although this change was not significant. Because these two are markers of post-natal germ cells, it is likely that the high expression at zygote stage is holdover of transcript deposited prior to fertilization, especially since levels drastically decreased following the first cleavage event. The third germ cell marker, STRA8, is considered a meiotic gatekeeper gene as it regulates a germ cell's entry into meiosis (Anderson, Baltus et al. 2008, Feng, Bowles et al. 2014, Wang, Chen et al. 2014). In the early pig embryo, it has very little expression, indicating it is not required for early development.

[0173] The last suite of genes chosen for analysis were genes involved in epigenetic reprogramming—CARM1, TET1, AND TET2. Each of these genes has been shown to interact with PRDM14 in the mouse system, as described previously. The ddPCR™ data shown here indicate that they are active in the pig system, with highest expression at one of the two periods of genome-wide epigenetic reprogramming. CARM1 and TET1 both showed exceptionally high expression during the PGC stage of development while TET2 showed higher expression at the zygote stage.

[0174] The atypical expression profile of STRA8 at the 4-cell stage along with three other genes that show similar anomalies at that stage (NANOG, PRDM1, DAZL) is of interest. This rise in expression at that single time point could be due to degradation of sample, or to a reduction in overall transcription that would result in a skewed ratio of the gene of interest to the housekeeping gene. In pigs, the maternal to zygotic transition occurs during the 4-8 cell stage (Prather 1993, Lee, Hamm et al. 2014). During this time, the zygotic genome is activated resulting in new transcription from the embryonic genome, and degradation of maternally inherited mRNA transcripts. The 4-cell stage embryos used for analysis in this experiment could have been collected during this critical transition phase, resulting in the differences in expression for these four genes.

[0175] This study provides valuable information regarding the expression of key germline-related factors during early pig development. These results clearly show low levels expression for the germ cell-related genes (PRDM14, PRDM1, TFAP2C, DAZL, VASA, STRA8. The low expression of germ cell related genes at E26 and earlier timepoints could be because of the low number of germ cells compared to somatic cells in the gonad, that results in the net dilution of the transcript copy number. Single cell sequencing may be an appropriate mechanism to investigate relative transcript levels in the PGC and germ cells, which is part of an ongoing effort in the laboratory. The data presented in this experiment represent a key first step in describing the normal expression profile of the porcine embryo, as well as delineating the role of PRDM14 at these early developmental stages.

### Example 3: Ablation of PRDM14 in Pigs Results in the Loss of Primordial Germ Cells Similar to Rodent Studies

[0176] Our knowledge of mammalian PGC development and gametogenesis comes from studies in mouse. In this example, we generate PRDM14 null porcine embryos that result in fetuses that lack the ability for functional spermatogenesis or oogenesis. When such embryos are complemented with donor embryonic cells, the resultant chimeric founder will have all the germ cells of donor origin (FIG. 15).

[0177] As shown in Example 1, feasibility studies have already been performed in the rodent model. Briefly, wild type mouse embryos were injected with CRISPR/Cas ribonucleoproteins targeting Prdm14 into the cytoplasm of the embryo to cause out-of-frame mutations and knockout of Prdm14. At 4-8 cell stage, when the putative Prdm14^{-/-} embryos are aggregated with donor-derived embryonic cells (from GFP transgenic mice) or pluripotent cells (embryonic stem cells), and transferred into estrus synchronized surrogate recipient animals, the resulting offspring is chimeric and contains both donor and recipient somatic cells; however, the germline is contributed exclusively by the donor cells. Aggregation of the Prdm14^{-/-} embryos with a blastomere from a congenic transgenic GFP embryo resulted in a visible somatic GFP chimera founder in G0 generation. Mating of the chimeric founder with wildtype non-GFP animals over multiple mating cycles resulted in GFP offspring exclusively in the F₁ generation. This was consistent whether the founder was a male or a female, confirming germline transmission in both male and female background.

[0178] We tested and proved the hypothesis that ablation of a PGC specification gene, PRDM14 similarly results in the loss of PGC specification and consequently germ cells in a domestic pig model. Using two separate strategies 1) direct injection of CRISPR ribonucleoproteins (RNP; Cas9 protein complexed with sgRNA) targeting exon 4 of PRDM14 alongside a HDR oligo carrying a “TAG” stop codon into the embryos and transferring the injected embryos into estrus synchronized recipient gilts; and 2) nucleofection of fetal fibroblasts cells with the RNPs and targeting oligos with the stop codon, and culturing the resultant cells at a clonal density to obtain PRDM14 knockout pig fetuses for genotyping and phenotyping analysis.

[0179] Targeting strategy and results from cellular targeting is shown in FIG. 16A. Briefly, fetal fibroblast cells from a crossbred (landrace X large white) pig were nucleofected using Amaxa Nucleofector 4D system, alongside RNPs targeting exon 4 of PRDM14. Exon 4 was chosen because it is the common exon in all the isoforms and is before the functionally important SET and zinc-finger DNA binding domains of PRDM14 protein. Besides the RNPs, a targeting oligo for insertion of a “TAG” stop codon in frame with the coding sequence was utilized. Following nucleofection with the RNAPs and the targeting oligo, the cells were cultured for an additional two days, and plated at a low density onto a 10 cm dish. Medium in the culture dish was replaced periodically, and the cells were allowed to grow and form colonies in the dish. Using cloning cylinders, clonal lines were obtained and propagated in a 12-well dish, and passaged further into a 6 well dish. At which point, genomic DNA from leftover cells following passaging was harvested, DNA isolated and screened using a high throughput Illumina iSeq platform (targeted amplicon sequencing). Sequencing results from four representative colonies revealed >96-97% reads harboring precise targeted knockin of “TAG” translational stop codon in-frame with the coding sequence, and resulting in the knockout of the gene (FIG. 16C). Two cell colonies (colony #C13 and C22) were used as nuclear donors for somatic cell nuclear transfer (or cloning) to generate PRDM14 knockout embryos and transferred into oviducts of estrus synchronized recipient animals. Following confirmation of successful pregnancy at day 35 of pregnancy when the PGC will have migrated to the gonad and start developing into germ cells, the recipient animals were humanely euthanized, fetuses recovered to collect the gonads. One of the two gonads was used for RNA isolation and screening for loss of expression of germ cell markers (FIG. 16C) and another gonad fixed in 4% paraformaldehyde (PFA) and used for immunohistochemistry (FIG. 16D). Results from these experiments confirmed loss of PGC and consequently germ cells in the PRDM14 null pig fetuses.

### Example 4: Aggregation of PRDM14 Null Embryos with GFP Positive Blastomeres and Transfer into Recipient Animals to Generate Surrogate Sires/Dams

### Somatic Cell Nuclear Transfer of Clonal Lines

[0180] In vitro, matured oocytes will be enucleated by aspirating the polar body and MII chromosomes with an enucleation pipette (Humagen, Charlottesville, VA, USA) in 0.1% DPBS supplemented with 5 μg/mL of cytochalasin B. Fetal fibroblasts (FF) from validated PRDM14^{-/-} and a validated donor GFP knockin reporter cells will be synchronized to the G1/G0-phase by serum deprivation (DMEM with 0.2% FCS) for 96 hr. After enucleation, donor cells will be placed into the perivitelline space of an enucleated oocyte. Fusion of cell-oocyte couplets will be performed by applying two direct current (DC) pulses (1-sec interval) of 2.1 kV/cm for 30 s using a ECM 2001 Electroporation System (BTX). After fusion, the reconstituted oocytes will be activated by a DC pulse of 1.2 kV/cm for 60 s, followed by post-activation in 2 mM 6-dimethylaminopurine for 3 hr. After overnight culture in PZM3 with a histone deacetylase inhibitor Scriptaid (0.5 μM), the cloned embryos will be cultured in PZM3 for another two days until the embryos reach 4-8 cell stage.

### Aggregation of Embryos for Generating Chimeric Surrogate Sires and Dams

[0181] Donor GFP and recipient PRDM14^{-/-} SCNT embryos at 4-8 cell stage will be used for embryo aggregation. The donating GFP embryo will be denuded by exposure to acid tyrode solution (Sigma Aldrich) for approximately one minute or until the zona pellucida fell off. Individual blastomeres will be disaggregated via vigorous pipetting. Disaggregated donor blastomeres will be treated for 1 hr in phytohemagglutinin (PHA) treatment and injected into 4-cell recipient embryos. Injected embryos will then be washed and incubated in 50 μl drops of PZM medium under mineral oil (Sigma-Aldrich) at 38.5° C. in a trigas incubator with 5% O₂, 5% CO₂, and 90% N₂ air until they reach early blastocyst stage on day 5. Healthy and fully aggregated embryos will then be sorted for transfer into surrogates. Non-aggregated PRDM14 null embryos will be used as controls.

### Embryo Transfers

[0182] The recipients for embryo transfers will be synchronized by oral administration of progesterone analog REGU-MATE® (Merck) for 14-16 days. Animals at days 5-6 after natural heat will be used for aggregated blastocyst transfer (into uterus) for generating chimeras. Surgical procedure will be performed under a 5% isofluorane general anesthesia following induction with TKX (Telazol 100 mg/kg, ketamine 50 mg/kg, and xylazine 50 mg/kg body weight) administered intramuscularly. Pregnancies will be confirmed by ultrasound on day 27 following transfer. Fetuses will be recovered on day 35 of pregnancies for harvesting gonads and confirming chimerism and germline contribution. Additionally, pregnancies will be allowed to go term and the piglets will be recovered following natural delivery.

### Fetus Recovery and Screening for Putative Loss of Germ Cells

[0183] On day 35 (30 days after embryo transfer), the embryo transfer recipient animals will be humanely euthanized, and fetuses will be recovered for screening chimerism and germline contribution from injected donor GFP embryonic cells. Fetuses will be assessed macroscopically for viability and GFP expression. One of the two gonads will be fixed for immunohistochemical analysis, whereas the second gonad will be utilized for RNA extraction. Fetal tissues will be harvested for DNA extraction. For isolation of genomic DNA (gDNA) from cells and tissues, the QIAamp mini DNA Kit (Qiagen) will be used according to the manufacturers' instructions. Total RNA will be isolated using Trizol plus RNeasy mini kit (Qiagen) and mRNA from individual blastocysts will be extracted using the DYNABEADS™ mRNA Direct Kit (Dynal Asa). Synthesis of cDNA will be performed using a High Capacity cDNA Reverse transcription kit (Applied Biosystems).

[0184] The gDNA samples will be subjected to PCR for chimera detection with genotyping primers, and qPCR performed for the detection of GFP allele and chimerism rate. Prior to use in the qPCR analysis, the dynamic range of qPCR primers will be validated (amplification efficiency >90%). The GFP labeled pXEN cell line (Xnt GFP #3-2) will be used as a positive control (GFP+, 100%) and fetal fibroblasts from wild type fetuses will be used as a negative (GFP−, 0%) control for investigating % chimerism. Relative expression will be calculated using the comparative 2^{-ΔΔCt} method. qPCR will be performed in triplicate. Cycling conditions for both GFP and reference (ACTB and YWHAZ gene) products will be 10 min at 95° C., followed by 40 cycles of 95° C. for 15 sec, and 60° C. for 1 min.

[0185] RT-PCR using primers against a panel of germ cell markers including but not limited to PRDM1, SALL4, DPPA3, DDX4, KITLG, DAZL, DND1, PRMT5, NANOG, or AID will be performed. Likewise, immunohistochemistry will be performed with antibodies validated towards pig antigens.

### Breeding and Analyzing the Fecundity and Fertility of Surrogate Sires

[0186] A few of the embryo transfers from aggregated embryos will be allowed to go to term and farrow naturally. The offspring will be monitored for body condition and reproductive development as below:

[0187] Body condition. The animals will be weighed on a bi-weekly basis to screen for body condition and fitness.

[0188] Testicular ultrasound. Testes of boars at the immature and adult stages of development will be imaged using an Exago ultrasound machine and static images will be captured to measure the diameter of testes.

[0189] Testicular biopsy and cross-sectional analysis. To assess whether seminiferous tubules are intact and the germline is present in surrogate sires, biopsies of parenchyma will be collected for cross-sectioning. Briefly, boars will be placed under general anesthesia, a small incision will be made in the scrotum and an 18 gauge biopsy punch will be inserted into the testicular parenchyma and ˜100 mg of tissue removed. The tissue will then be fixed for 2-3 hours in Bouin's solution followed by washing in 70% ethanol and processing for paraffin embedding. Cross-sections of 5 μm thickness will be adhered to glass slides, deparaffinized, and then stained with hematoxylin and eosin. Histological analysis will be performed to measure the circumference of the seminiferous tubules. Approximately 100 fields will be measured for each sample using Nikon software. Immunohistochemical analysis against known germ cell markers will be performed for monitoring reproductive fitness and germ cell development.

[0190] Blood sampling and steroid hormone measurements. To evaluate functionality of the hypothalamic-pituitary gonadal (HPG) axis in surrogate sire/dam pigs, serum testosterone and estrogen concentrations will be measured using LC-MS. Briefly, blood samples will be collected every 15 minutes for 1 hour because testosterone is secreted in a pulsatile manner. Samples will then be centrifuged to separate serum and plasma and the serum stored at −20° C. before shipment to the Endocrine Technologies Support Core (ETSC) at the Oregon National Primate Research Center (ONPRC) for measurement of testosterone by LC-MS analysis.

[0191] Semen collection and analysis. Assessment of sperm production by surrogate sires will conducted by collecting semen samples. Briefly, boars will be trained at a young pre-pubertal age on a dummy apparatus (MOFA) for manual semen collection. Samples will be diluted in commercial extender solution (MOFA) and analyzed by light and fluorescent microscopy. Semen from the founders will be FACS sorted for expression of GFP. We expect all the spermatozoal to be GFP positive and therefore of donor origin.

[0192] Surrogate gilt estrus detection and insemination. The chimeric founder females will be heat checked daily and estrus activity noted from five-six months of age for regular 21-day cycles. Estrus in the gilts will be detected by noting visible signs of estrus behavior including increased physical activity, phonation, pointed ears, and lordosis (arching of the back in response to physical pressure) in the presence of teaser boar. The gilts will be bred to with PIC semen at 10 months and pregnancies confirmed by ultrasound 28 days later. Fetuses will be harvested to screen for expected GFP expression. This will confirm successful germline transmission.

### Example 5: Generation of Surrogate Sires and Dams by Ablation of Endogenous Germline in Cattle

### Ablation of PRDM14 in Cattle

[0193] CRISPR ribonucleoproteins (RNP; Cas9 protein complexed with sgRNA) targeting PRDM14 will be direct injected into embryos, and the injected embryos will be transferred into estrus synchronized recipient heifers. Following confirmation of successful pregnancy, the recipient heifers will be humanely euthanized, and fetuses will be recovered to collect the gonads. One of the two gonads will be used for RNA isolation and screening for loss of expression of germ cell markers and another gonad will be used for immunohistochemistry. Results from these experiments will confirm loss of PGC and consequently germ cells in the PRDM14 null cow fetuses.

### Aggregation of Embryos for Generating Chimeric Surrogate Sires and Dams

[0194] Cow embryos will be injected with CRISPR/Cas ribonucleoproteins targeting PRDM14 into the cytoplasm of the embryo to cause knockout of PRDM14. At the 4-8 cell stage, the putative Prdm14^{-/-} embryos will be aggregated with donor-derived embryonic cells or pluripotent cells and transferred into estrus synchronized surrogate recipient heifers.

[0195] A few of the embryo transfers from aggregated embryos will be allowed to go to term and give birth naturally. The offspring will be monitored for body condition and reproductive development by testicular ultrasound, testicular biopsy and cross-sectional analysis, blood sampling and steroid hormone measurements, semen collection and analysis, and surrogate heifer estrus detection and insemination. The resulting offspring will be chimeric and will contain both donor and recipient somatic cells, but the germline will be contributed exclusively by the donor cells.

The application's sequence listing, which the Patent Office published only in electronic form, follows.

SEQUENCE LISTING (110 sequences)

SEQ ID NO: 1 - DNA, 13736 bp, Mus musculus
tcagaagtctagggtcccgagacccagcgggtgccgccctagccttggcctgaggtaggtaggtctttggcccgctggagggacctaccccgaaggctacaggcttccagcacggctgggaacagtgctctgtaatcgctttcaaaattcgttttgcagttgtttggttgtttttgttttttctttgttttacttagttagttgtttttggctttgtttttgttttaaacttcgtaattggattttggctttccacctccggagtcgcttgtcttgggagttagagcctgcgctgttcggggctcagggggagatagacggagaggcctgtgtggtggctgacctcgccccctgaccctatgttctttaacatctgagtcacgacccgggttgttttccttattggacacattgatccctgatcttaaaatcctcggaccctacgggtcttcactccttagccctgctgtgtggctactgagaaagaagcatttcgggggccagggccgccgcggccaggtcggcgacaaccgagacatctctctgctgcctggcttgggacttgtcatcccggagtctccagaggcgacctaggttgagatggctagggttgccaagagattggagatgtggcgggaaggggcgctgggcgtgggtctctagagggaggacgaataccgctccgctcccctcggtgctgttgggaccgccggggtcgctgacgtttcgctaaactccttggggtgccgagtcgactcagaaccccttctgcactgtcccaccgagagcgcacacttctcctatctcggctgcatactcaagagcgcctgaagccactgcctgctccgaaaccggtgcagggtcgtgccctagtagcttggctaaaaaaattatattaaaaaaaaaaaaaaaaagacgctcgtagagacctaggcgggtggttcgttttgttgggctgataattaagagagacggaattgaaacccgttttgtaggagccgggttgagggcttgggagcgggggtcaccggcattccttagtcaaggtggtttagggagcaaaagagaaggcgacctgagccagcacctttcagtcgggtgacaccaaggcagattttcgttagaggtttgagacgtttggctttttagttcggtttggtgtgggagtttgtgccttttgtgttacttttttcgagctaggattggcgggatcgaattgggaactttgttcattgactttgatggggtggagggaagtagttaagatcacctaggacccctcactcagccagctcggtttcccacagatccgcaaaactcagcttgcgatggccttaccgccctctggtgagacccagtcccaggacaaggcgaactacctgccccagagcaaccctcaccacctgactacctactacgcgcatgccccaggctacagtcactttaggaacctcgccaccaccgaggaggagtttcaaccttggaaactggcagctgcagtgcttgagtcccaggcgatggcccctcttgatgcttttcggatgactgctcccttgttgaacccgggtctggctgttcagagcgagccgctctacaatctgccctggtacaaattgtcaccatggaaccgaattcctcaattcactcccgaagtaccacgatttctagacagcactgagcataggagcagcggttccagcaaccaaaatttggtcctcggcggcggcggtggccaaatcagtggtcagaggtgggaagctgaaaatttacttctgccatccccggtaattgcttccctactacctgatggaattaagtcgtcccagtcaatatctgtcccccaaaccttgaatcaagaggggaagctgccgttttgcggcttcaacttcacagaggaggaactgagcttcgttctgtatggagccatcgctagtccggagcacccaaccgacttacagcatgcaatttcaggcatcctggttcccacagagagttctggtaaggaaatctacattttgggtctgggttggttggtacaggtccggaccacgcagtattaaaacatggatgtatgttggggcgagtgtctctctaaaccgccttctctgctggcttctcatggtcctccttgcctaaccgtgtaattcctgagattgcttttagtgagctctgaggactaagagccaagtggtttccctcggtggctttaggaatgtacaaagtatctacatgatggtctccagaaattcacacctggcagctctttacctcagaaagcattgtctctgactctcaagtttgcaaaatggagttcattacccaccaaacctcccccaaagggtttttttgaggctcaaatgagcaacagtgtacaaaaagcctgtgtcaatgatacagcagcagtaaagggtagaggataaatgtccaatgtaaatcctctctagggactgagggaaccctgtcgggaaggcaactcactgtctttttctagggtctaatcatcttcataaaaccctggacaaagactccctccagcttccggaaggtaggctgcactccttgcctggatttatttcccacaactaatgttgactcactgcccaggctcattctcctttcctctcctgcctcgggttcacctaggtctctgcctcatgcagacctcatttggtgatgtgccacactttggcgtgttctgcagcgacttcattgccaaaggagtgagatttggaccctttcgaggtagagtggtcaatgccagcgaagtgaaggcacacagggacaactctcggatgtgggaagtaagtgtgtttctgggggtggggggtgctgaatttggggaggacgacctgaggttgggggaggcggtacccttgaaggcctttattgagaaagacattggtgttcgctccagcaggacctcactctgcatgaaatccacgttgtagtgggtgaagcaactttaatctgtacagatcagacatggaaagtacatttaaagaattaccactgtgtgttttatttacaggcaaaccaagtgttttaaatatgatagagtgttaaaagcatgctacaggaaagaaagacaagttttagactttcatgttactttcttgtaaaattagccaaggattaacaaaacaaataaagcaagttagtgcctgtctaagggaggctgctgagacagcagcttctcgtttacaggacccacttgtcagaataaccaggtaacttaaaatctgaaagccctgaccctggacttctagcaatatactttaggatgataacctgtgattttggcaatgtggaagagctgaattaaacagtaatttatactaaactgtacttaaactaagctgcggcactagctgcccgatcccacgcctccacactgggcagaagagaaagaatcctccgcagctcatcccaaagggctgggctcaaataagacctagttagttcccttacccttgcttataaaactaacgtacaccacagtagaaactcagggatcgagaatgtgataagggcatgaattcatttttaaagtatgttgttagccaggcgtggtgacgcacacatttaatcccagcactagggaggcagaggcgggcagatttctgagttcgaggccagcctggtctacaaagtgagttccaggacagccagggctatacagagaaaccctgtctctaaataaataaataaataaataaaccctgtctctaaataaataaataaataaataaataaataaagtatgttgttacatagtctatagaggaactggagaaatgcttgcctggtatgcccaaagtgctggactcagtccccagcaccacataacactgcatggtggcacacataagcatggtggcacacacacatcagcatggtggcacacacacatcagcatggtgacacacacacatcagcatggtggcacacacacatatcagcatggtgacacacacatatcagcatggtggcacacatcagcatggtggcacacacacatcagcatggtggcacacacacatcagcatggtggcacacacacatatcagcatggtggcacacatcagcatggtggcacacacacatcagcatggtggtccacatcagcctggtggcacacgtaagcactgcagagggaacagcaggtggattacaaattcaaggccatcctcaactatattttaaattcaagtcctacctgagaccctctgcagaaaggcgtttatatgctacttcttatatgggaatctgatttatagaaatgtgttctatagtaggaatttgggtatagatgttaaatttcattttatagatcagacgaaaggaaaacaaaagcaaatacaaagagctcatgctttgggggggtgctgggtgtgcttgatggaccctgaactcaggaagctgaggcagaggcacaagtgtggggccaacctctgatacatagaaagattctgaccaaaacaagataaacacacacacaaaaaaaaaccaactgtatgtgtcatcttatttagatttttgaagatggtcacctgagccattttatcgacggcaaaggttctgggaactggatgtcctatgtcaactgtgctcggttccccaaggagcagaacctgctggccgtgcagcaccaagggcagatattttatgagagttgtagagacatccagcggaaccaggaactgcttgtgtggtacggaaatggctatgagaagttcctgggcgttcccatgaacctccgtgtcactgagcaaggaggccagcagctgtctgagtcctctgaaggtgagtctgcccagagagaatctactagaacgcttactgggttccctaacgtccaactaagatgccagagaccctggagaggtggattggcgccatctttttttctacagcgtctttttctaaggttatccatcttttcccccttcccattcttgggaataaaagacaaagaacgcatgccagcatattgtgggctagtgagtttgatccactcctgctcaggccagctctctcaaatgatgggctgcagcaacttagtgaggtggaaaatcaatttagtgattgaaaccagcataaaaggaaaaaaagaaagaaattagaataggaaatattgatgagaatcacttaagaaactctgttgttaagtttttgttttatatagaaacattataagaatcagggcttccagttaaaactattttctcaggctgaggcctcttgtttcctatacaaggactctaccgttgagctacagacacttccagcctctaaactggatactttgtacgcacctttaatcccagccttcagggaggcctaggcaggcagagctctgagtctgaggccagcctgggctacagagtgatatggagatacctcaaacaaaactctcaccacttccagcccccacccaccataagatttcactgtggcaaatttgaaaaatgcgggactatgctctcttctctgtttttttgtttttttctttttctctttcttttttttttcttttttgagacagaatctcactatatagccgggattggccttgtactcaaaaccttctgccccaactccccaagtgctcctgactgttgaactgtgtgtgagtctgtgtgcgtgtgtctatggctgtgtgtgtgtgtgtgtgtgtgtgtgtgtgtgtgtacacctggagatcttgtagagaggctagctagttcttagcacaggtggggctggcactatgactatgcgccttgctcagcttccaggggttgctgctggtccctggatgatcacatctgagtggctaggaggcagaggacaatcaactcaccataggaataggtcttcagatttggtgtttttaaggaaagagtgacgctgagccctcagactatgctagaattttcaggtttgtgtttttttgtttttttcttctttgttccctgtctcaagtagtccagtatggatggctggactgctcttcctacttccgacccccaagttctaggattataagcatgtaaagctatacccagctttaacttgtttgtttgtttgtttgtttgttttttgacacctggtttcactaagtagctgttctgaaactcactgtgtagacagggttgaactcctgacttcctctggctcctggatgctgaggtttaaagtgtgtaccatcgcactaagcttgcaatctactcctaaatattacctgtccaactggtttgtatacataaacatttggaaactactgactcagtaggtgaggaaaaatataaactactgtgtgtataaaaggaagacatcatcactacagtgtaataagcagcccaaagagcaggtaaaacaacacatacatgttatctgtcacactatggtgatgctcagtgtgcccagcctggtctacacagtgagttccaggacagccagggctacaaagagaaaccctgtctcgaaaaacaaaacaaaacaaacaaacaaacaaaaagtatgcacaccacactctgcccgtgataccatttctgacaaggtgtgaaaggcagcttttaaagattaatttatattgagaagtcttacaagtgacttcctatgatgactgttaatattgagtgtctagttttgttccattgctgtgttgaggattaaatcaaactcgggtcctgactcctgccaggccagtgctctgctgctgatccacaccccagcataaggtcaatgtttttggagatgattaataataaaagaaaaaaatagtggttgtgtgtgtgtaatcttgatacttgcaaggttgaggaagaagaattttaaattcaaatctagtgcgggttactcagggagatcctgcgtcaaacaaaaacccacagcattttggtagggttggtgggtgccttccctcacaaggtctggggctggaaaggcggactcttgacttagtgtcataagtggactgtttgaacagaccaggcatgcctggggatgaagcaggaatgactcacagacaacagctgcgtcactataaccccagcctaggctatatctcacaaagcagggaaacctggagcacactgtactctcaacagactggagagtgtcctttccatgtgcctcagttggtctaaacctcttccaggcagctcacctggttcctgcctcttccaggtctgctctttgcagcctcctgccctctgagaagggctcttagctttgattgcttgctctcacaaggagttacctagtgaatccagttagtttcagggatccctgaaagtatttggagttttggtttattttttgctttttgagacaggtttctctttgaagccctccctggctgtcctggaacttgctctgtagaccagggtgaccttgaagcctgagatctgcctgcccctgtctcccaatgtgttagaattatactgttttgtattgtgacatttacatgagatcatggtgataaacaaaaaagggaaggctacggtttaacagttatgtgtttgccaagtagatgggggtctgtggtgtggcaccatcacccagccttctgcagatttctacttacgctccctcctggttcctctcccttgagggcagaccgtaaggtctctggttctagtatccaggaacatcttgagtggggacgttcttttacctgtcccgaatatagtcacacatcttgttgacttggggtccgagctgtcttcttgagctatggatttgttataccttgtctgacctgtaaacctgaccctcctgcctctgtcttttcagtagtgggattactcttggcacagacacctggatctgacacctctttgtctctagtttctctcttccttctttgtccgttggaaaaaaaaaaaaccagacttacctttctgtgcttgctttctgacactcagtgacttatcactcctgggtcagagtcagtaagtgttagaatcaacgtctgtgaattactgaaggcacgatgcattcagtatatgtagtccaggctgacctcaaatcccctttggagccaaagatggccttgcactcctgatttttctgcccaggttcacaggtgtgttccaccacacccggttatggtgtgtgtctgtctatagctgttttgaatcctctttgaggtggggaagaggagggacagaggttaacacaccttccgacacttccacccctgtgtttgacagagtctgcagaaggttacagatgtgaacgctgtggaaaggtgtttacctacaaatactacagagataagcacctgaagtacacgccctgtgtggacaagggggacaggaagtttccgtgttctctctgccaaagatcctttgaaaagcgcgaccgcctccggatccatattcttcacgtccatgagaggcaccggccctacctggtgagcagttgctggtttgatgtcttcctagtgtgtttttacactcccttgtcgtgaacacacagagaggggttcatgggactgactagaacattcaatgcttgccgtgccggggtagtgtggaagacgccaatgtgtgagcgtgagcgaatgtgcccaggaagaagcagggaacagacgtaggagtgggcgaggacagttcagccttggggcgaacacagccgtgagctgtactggaagctgggaagagattaggtgactgtactttgttccacacccggtcaggctctagatagtcactggtgcagaagaaacactgacatggtccaaagaatggaaggctacatcacagtctgtgttctttctttttttttttttaagatttatttatttattatatgtaagtacactgtagctccagaagagggcgtcagatcttgttacagatggttgtgagccaccatatggttgctgggatttgaactctggacctttggaagaacagtcgggtgctcttacccactgagccatctcaccagccccgcagtctgtgttctttatgaggatgagagacgacagtgatgacaggaagctgttctctgccagcccagacacccattgctctgccaggcttggtcaaaagggcaaaaccaagtttgtccttaaaagacaagatggagttctgtgttttgttacagtgtttatagttctgtgtacatgtgtgcgttgtgcatgtgtgagtagagtgcccctgagaggacagaagtggccaccagagcccctggatttggggttgcagatggttgtgagccaccatggttgtgctggaaactgaagtgcagttcatgcatttagccaccaggtcggctcgccagctccttgtcatacatagactcttatagtacatcttatactagtgttacactagtgtataatatgcagcgtcatatgccagtgctaacatttatagttttccacattttaatatctctaaattgatctgtgttctacaactgggccatagtttttttctttttttttttctttcttgtttttgttttaatgtttttaaaatcagggggtttttttttgttttgttttttgttttctttggtaaaggatacatttatttttattttatgtgttttgcatgcatgaatgcacaccatgtacattcagttgcttacagagaccagaagaaggcatcaggtcccttggaactagagttgctactgacagtcagttgtgagtcaccatctggatgcggggaaccaaacgtgggtcctcagctagaacagcaattgctcttcagtcagctctccaggccctaaattctgggttgcttgtttgtttgttgttgttgttgttgttacctaatttatgtggtggtgtgtatgtgtgtattgttgttgttgtacatatctgtgtatacctctttggagtctttcctctttatcactttctgccatagttttttgagaaagggtctgtcttagtcagggtttctattcctgcacaaacatcatgaccaagaagcaagttggggaggaaagggtttattcggcttacacttccatactgctgttcatcaccaaggaagtcaggactggaactcaagcaggtcagaaagcaggagctgatgcagaggccatggagggatgttctttactggcttgcctcccctggcttgctcagcctgctctcttatagatcccaagactaccagcccagagatggtcccacccacaaggggcctttcccccttgatcactaattgagaaaatgcctgacagttgtatctcatggaggcatttcctcaactgaagctcctttctctgtggtaactccagctgtgtcaagttgacacaaaactagccagtacagggtctttcactaaagctggagttaggctggcagtctacaaaccccagcaatcctcttgtctctccttcccagagccctggggtgcaagtcgtggttggccgtgcttgctttttaattaaatggctgctgggggttgaatacaggtcatgcttttgcatccactgagccacccacccagccatcggaaagtgcttgggtcccttctctctagtttacaaggtcatttattttgtccctcatagtaacaaaagctctgcttaaccctgggtttaaaatctctcctgaacacaagcagcacctatccaccgaagctgctccaagagtgcctcaccctgaatttcttgtgtgctttccctaacagtcatgtccagagagttcatgaggttttttgtttgttttaaagttaatatttcacaagaagaagactcaagagaaacagacatacagaacattggatatctggtttagttacagtttgggtgctagtggttgaacaattggaacatctgctgaacaagtgctcgaccactgagcgacagccatggactcacaccaaaagatgcagggtacacacttgacgattccatcctgccagtgtgggagctctgtagtccctttgcttaggaaggtctgaggcagcttctaggttgcttgcactctgtaatctcaggcaatccttggccagcgacttgttgatccacagatgtgcatagaataaagaaaatgattctcggactgtcagtatggctcttgtgttataatgcttgccctgaaaggttgacaacctgagtttctttctgcgaacaaactcaggaatcaacagactttgaagtgtttttctgatgattatcacacatttgcctttctctaaacagacaagtaaacaaattagggatttttcaaaaacttctctcacccccaggaaaatatatgttgagacagagtttggggtggggtggagatgaaatttcaactctacgttttgttatctccttagtgttcaacctgtgggaaaagtttttctcagtcttccagcctgaacaagcacatgagagtccactctggagacaggccataccagtgcgtgtactgtacaaaggtaggtgagacgtcctttggtgccagcctgacttcatgattgggtgactaattcatcttgggtaactagtccattaccaatcagccaatacctttttctaggaattctggatcagccaggactacagactgaaaccatgtttcaaaatgaaacagaaactttttttttttttttttggtttttctagacagggtttctctgtatagccctggctgtcctggagctcactttgtagaccaggctggcctctaactcagaaatccgcctgcctctgcctcccgagtgctgggattaaaggcgtgcgccaccacgcccttaaagaaactttttaaaaagagaatttaagagcacagccctagccgctttcagccccggcctttgatgctaacctggctatgtgaccttgagcaaatccattagttttttgtagttttctctttggtaaaatgtggggaattgtagttgttgggctctatcagttggtctttataaaacttctcattgtgtctgctgattgtaaccattgaagtattggctactcctgctgctgataatcattctaaaaggacatttgtgagggtggcatctgattcatgcactgtagaacatccatcaacagaggcagagtggaattaaggcttttttgaaaaagacgatggtttggtcatgtttaagaatattctaggggctggcgagatggctcagtggttaagagcactgactgctcttccaaaggtcctgagttcaaatctcagcaaccacatggtggctcacaaccatccgtaatgagatctgacaccctcttctggtgcatctgaagacagctacagtgtattaatgaataataataaataaatctttaaaaaaaaaagaatattctaagaatattcaagcattttactttggtgatgtccagtgctgtccggtttgtagctatttccatatgtggctgtttgagagcacagaagagaaaagacccaggcacagtgaagcttggctgccatgtcaccttgttgcttttgttttttgagacaggattttttttttttcatataaccctgactgtcttggaactcactctgtaaattaggcttagccttgaactcacagaggtccacatgcctctgcctcccaagtgttgggcttaaaagtgtgtaccacagatgtctgtcaaaattagagtttctcaatcaaaacaataaaagctgatgtgtccattacaatgaaaattaacccctttgctgagttgcagcccatggaagttggctttttctgctttctgccctctgcagaagttcactgcctccagcatactccgaacacacatcagacagcactcaggagagaagcccttcaagtgcaagcattgtggtaaagcctttgcatctcatgctgcccacgacagccacgtccggcgctcacacaaggacaatggccgtagctcctgcgatatttgtgggaaaggcttcctggatcaagaggctttctatgcccacatgaggcttcataaaacctgctaggtctttgaaagcaaagccagttacaaaccaagaacgctgactctcattcctgctttgtctgtgtcgcgtgggcatggttgaagtgttcagtgagaatctggagaatggagtagttgatctgaagctccaaaccttatggaatccattcagaccaggagtgagaataaagtcctgggtcttgtgattaaagaagaaaaggttccccctctcctgtctgccttgaacaccccgttatacggtgtctgtagccagcgactatgtgcatgagtgttcgccgcgggcatgtttctgtgctgcatgcgtgtggaggcccaaggaagacatcagatcctctggggctgtatttacggatagttgtaagccactgtgtgggtaccgggaattgaacccaggtcctctgctagtgctgctaggacttaactgctaaaccatctcaccagctcctgctttctatttggttttggtggtggtgttttggtctctctctctttctctcccacccccaagctggctttaaatttgtcctatagctgaaaatgaccttgaattacaggattaagttaccacagccaagcaatttgcactacctagagatttggtatgttataactaagtcttctgccgtgtattagtgttccatcttaatttgagctcatttctctcctcactgagcaatgaaaatgccaggtaatacacctagtatcagaaagaatcatttccagggcaggaagactggcaattcttgttgatgtctaacttttaccaacagagaaggaaaattatatctgaataaagacaggctgaaaataaacacttatgctactctggtttt

SEQ ID NO: 2 - protein, 561 aa, Mus musculus
MALPPSGETQSQDKANYLPQSNPHHLTTYYAHAPGYSHFRNLATTEEEFQPWKLAAAVLESQAMAPLDAFRMTAPLLNPGLAVQSEPLYNLPWYKLSPWNRIPQFTPEVPRFLDSTEHRSSGSSNQNLVLGGGGGQISGQRWEAENLLLPSPVIASLLPDGIKSSQSISVPQTLNQEGKLPFCGFNFTEEELSFVLYGAIASPEHPTDLQHAISGILVPTESSGSNHLHKTLDKDSLQLPEGLCLMQTSFGDVPHFGVFCSDFIAKGVRFGPFRGRVVNASEVKAHRDNSRMWEIFEDGHLSHFIDGKGSGNWMSYVNCARFPKEQNLLAVQHQGQIFYESCRDIQRNQELLVWYGNGYEKFLGVPMNLRVTEQGGQQLSESSEESAEGYRCERCGKVFTYKYYRDKHLKYTPCVDKGDRKFPCSLCQRSFEKRDRLRIHILHVHERHRPYLCSTCGKSFSQSSSLNKHMRVHSGDRPYQCVYCTKKFTASSILRTHIRQHSGEKPFKCKHCGKAFASHAAHDSHVRRSHKDNGRSSCDICGKGFLDQEAFYAHMRLHKTC

SEQ ID NO: 3 - DNA, 21375 bp, Sus scrofa
tcgcggtggcccaggatggctctgcggctgccaggtgagaccggtccccaggacaaggagtgctactcgcccgacaggcttcagagcagcccccaacacctggccgcctactacacccctttcccgcactatggccattacgggaacaccctcaccacggcggaggagggtttccaacctttccggcagctggaggccctgtcggcgtccccggctctgccccccttcgccttccggacagcgcctcccttgctgagccccgggctggcgctgccgagggagccgctctatgatgtgccctggtacagcaagctgccgacgtggtacccgatcccccacctgcccagggaggtgccacacttcctgaacagcccgcgcgagttcacgggcgcccccgccgaaaacttgggccaggtcggcggccggagcgatggtggccagtgttggggacctgaagttttccttccgccgcccccagtggatgcttctctgctacccgagaggccgaagccctcccagttgttacctggctcccccggcgagcgctctgaggatggccccaaactcgtgaaccaagagagaaaggcatcgccccgttaccacttcacccaggaagacctgcacttagttctgtacggggtcattcccagccctcagcacccagcccgcttgcaccacgcgatgtcgggcctcctggtccccaccaacagctctggtaagggcagtccacaggatccaggacctgggtgggaggggagaagaggtgggaaggaggcaggagcagcgaagaggcgcttcaaggtggattcgaggcagtgcgggtcctgatccggagtgtacccggcttccaggagaggatggagctgcagaggtcaggctcacctcccagccccatttacttaactccgcgactcctgaggtggttttagtgagaatgagggggaggggagaaatggtttgtgctgtggggtaatcaggctggctcagattctagcagaaagtacgaggtatttcaatgagaacctcgtgccttttacactgggagtctcggctcagccacctgacctcagcccgaatcagcattatctctgatttctcaagttccttacatgtgcaaggggggttaattacagcataaccaactagcctccttcggagtctcaaataagaaattgcatatgtaaaaggagcaggaaaaaagacaggtaacatcaaaactgagtacaatggtgagctccagctagtgggttggaaaactcggcatgaaagcctttcatactacgtttcatcgaaacataaacatttaaccctgtctttttctagggtctgattctcttcctcagactctggataacagctcccttcagctcccggaaggtaggcagggctcctggcttggaatccttttccccagcaaatgcggtcagtttcctgactggcattcttttctgccttgggatcttcctaggtctctgcctgcggcagacgatgtttggtgaggtcgcacattttggtgtgttctgcaatagcctcgtggccaaaggagtcaggtttggaccctttcagggtaaagtggtcaatgccagtgaagtcaagacccacggagacaattctctgatgtgggaggtaaagttcttaacggtggggttggcggaaagtggggagggaggcgggtggggaagaaccttggcccctgctcctctgggaggggggactttgtctctcttggggccataacccgctgtctgtgctgcctcttttgcaacataaaggaaaagaaaggcagatgttccatccaaaaggattgcacctctgcacggattctatgtattttttggtgccttaaggcattttcatcagaagattggccatggaatatacatttaaagaatcgatacattgggttatatgtatacacaagccaaatgctttaaagactagtacgaggaatacgccaagggactaaaaccagatttaaaatttttgacatttccctttgaggatttttaaaaactcatactcttgactctgtccgaggcaggctggtaggattgcagtttgtcagaatttatcagattattctaccttgtcctgagtatctacttcaaggattatcatttaggaaaatgatctgaaatccagacttcacaggattctctgtaataacaaaacattagagatggtagaattgccaatggcagagaaagaattaaattatggctttgttgatacacacgcaaactaagtctagagaaaatacaaaaccaatagtggtggaattaaatgtaatcccctatttcccttacctctgtttatgaaattaacttatgctcactagaaatttggaaatcaaggcagtgacaaaagaagactctttttaaaatgtcacatcacctgtagagatatttttaaactaataaatctgtttaagctgaataatattaataaatctcttcagtgggtcaaggttgagatttgaatgttgcatttttaataaataaattaactttataggttagagcaaaaaaaagtacctttcgacctttttgttggatttcatttagatttttgaagatggtcatttgagccactttattgatggaaaaggaggtgctgggaactggatgtcctatgtcaactgtgcccgtttccccacggagcagaacctagttgcggtgcaatgtcaagggcagatattctatgaaagctgcaaggagatccaccagaaccaagagctcctggtgtggtatggagattgctacgaaaagtttttggacattcctgtgagcctgcaggtcataaagcaggggaagcaggcatctgggccctcagaaggtgagtgcacgactttgcctcacccagtgagcccctctgggtgccaggtcagggctcttctcacggcacagcaccttgcacatgcttgtggagattctccccgcaaaggttaaggcaggggacagaacagggtgtctaaccagctggccattaccctgctggaggaaggtgccctcgtcttttcagagctgctaaagctactcctgttcctgaggatacctttagtttggagttccctgggggccttgtggttaaggaccggcattgtcactgctatggctcaggttcaatccctggcccaagatgctgcaggtgcagccaaaaaaaggggagacttttctttctttctttttttaattttttaatttttttttcctgctgtacagcatggggatgaaattactcttacatgtatactttttttttttccaccctctgttctatgtctagatatgagtatctagacatagttctcaatgctactcggcaggatctccttgtaaatctattctaagttgtatctgataaccccaagcaccccacgagacctttatttctttacttttctatcccctcattcactcccagagaaacaaaagtgaattaaatggatgcagccactgctcaggtgagccaccttctgattcctggccgttagggctcacatcgctcctgaagtcaaagctttagagcagctgtgtttttcagatggtggcctgcaatatcgtgatgtggtgggaaattgatttggtggtagagaccagcattaaagacggaaaaaagagagaggataagaataaaatagaatagaaaatattgatgctactctcacttaagtaagcattgtttgctgaggttttgtttctaatggatatgtgtatgctaagtctccaatataaaacgtgtaatttctttcttttttttttttttttttttttcatttttggccacccctcagcacatggagttcccgggccagggatcagatctgagctgcagtcatgacctaagttgcagctatggtgatgccggatccttaacccactgtgtatggctggggattgaacctgtgacccagtgctcccaagactcaaaggatcccatggcaccacagcaggaactcctaaaaccttattttcttaccatgggtctcagtcaactttgggaagcatagtgctacactctccagggttttttttgtttttttgctttttagggccaccctttcggcatatggaggtttccaggctagagatcaaattggagctacagctgctggcctacactacagccgccgcaacgcaggatctgagttgagtcagcaacctacaccacagcttatggcaagccagatctccaacccactgagccaggctagggatcaaatccacaacctcatggttcctagtcggatttgtttccgctgcaccatgacgggaactcctacactttccagttttgatgtggctgtgaacacatggggatcgtgggaggatgaagattctcattcagggttggaacctgggattctgcatttctatcaagcctccaggggatactgaaggtctggtccctgggtcacattttaatagcaaggagctagaagaccacccaccccctctctgggagctagcctctggaatttgcattttaaaaaagctctctgagcaattggtttttacttttatatccctaggaaccagtgatctcattcatggggataagacaaagcaaattactgtaagaggtgtagtcagatagaagacctcctcctgccattgctgaggagaaggttcaatccctggcccaggaactaccacaggccagtgtgtgaccaaaaagaaaaacaagagagagagaaagatgcatgtaactcacaaaatataatcatccttttgaaaaatttaacactgtatcagagctattaaaatgttcataggaggagttcccgtcctggcgcagtggttaaggaatctaactaggaaccaagaggatgcaggttcaatccctagctttgctcagtgggttaaggatctggtgttgccgtgagctatggtttaggtcgaagaagactcggctcggatcccgtgttgctgtggctctggcgtaggccagtggctacagttccgattcaacccctagcctgggaacctccatatgcagccttagaaaagacaaaaaaataaataaaataaaataaaatgttcataggagttccttttgtggctcaatgtttacaaacctgactagtatctatgaggatgtgggttcgatccctagccttgctcagtgggttaagggtctggtgttgccatgagctgtggtctaggttgcagacatggcttggacctggcgttgctgtggctgtggcgtaggccagtggctacagctccgattagacccctagcctgggaacctccttatgccgcaggtatggccctaaagggacaaaaaaataaaaataagaaataaataaaatgttcataatgtttgatatatcagtaatactcttctggaaatttatctacaggaaatagtccaaaaggaaaagctttgtccacaagaattttttttttgttttttttttgttttggctttttagggcctcacccacagcatatggaggttcccaggctaggagtcccttcggagctgcagctgctggctcataccacagccacagcaacactggttcctcaagccacttattgaggccaggggtcgaacctgcaacctcatggtcactagtctgattcgtttccactgcgccaccatgggaactccaagaatttttagtataacgtcatccacattagtgaaaaatcacaaaattcctgatagtagaataattaccaggtaaatgatgatatatcagcatggaataatatgcagacatcagagattacaatcatataagcaataagcctgagggttatcatggtccgtggcgaaaacccccagttatctgtgctccacttctttttgtctttttgctatttctttgggccgctccagcggcatatagaggttctcaggctaggggtctaatcggagctgtagctgccagcctacaccagagccacagcaacgcggtatcggagccgcatctgcaacctacaccacagctcacggcaacgccagatcgttaacccactgagcaagggcagggaccgaacccacaacctcatgattcctagtcggattcgttaaccactgcgccacgacgggaactccctgtgctccacttctaaccaaatcatagccgatgcttatttttactgttatgacaacgggtatttttggatcatttgtggcggaaagcttgtaaataacctaatttgttggggagactaagggatgaagtcattcgtttgccgttcataggagtgttttaggataggagagaaagaatcaaaatgcctctctcccttcaaaagaaaagaaagatccttttttcaaaggcttttggtgaggcttggtggacatcttcccctttaaaggggtcttgagtgggagggaagggcctgggccctatgtgggcgggttatttgagtttttgcgcctagtcagtgtgtgtttggatgggtgggggtgcgaggtgtgaagacagctcttaatctttaccaaaccgaatggtaatggggcagaaagcgtcggttttggccttgagaaacccttggtcataaagattgagctgggagggagaaagaaaagaaacaggacaaaattaggttaagatatatttccgaggacctgagcagaaaagtaggcggctgaagcctaattagtctgggtgctttgtcatttctggctaagtggttgttcttatgcaaattcacggccgaacccttactctgaattgcggggtgccttcgtgctttgatttgtaaaggtctgtcgtgtaggcccccccttcccaccccaggaagcaggaaggccaggtatttctaaccaatgaaaattctcgcttggagccaaacctgtctcagcaggggaattctgagagtattagcacctcaatgaaagcgatagacgggacctggccagggatggtcctggggctggtggttgccttcctgggttttacttaataaaacgatttattaccttagccacctgttgcacgtgcatgggacagagttatcagcaaaacacccagtggttggctttcccgctatcctgatgctagagatttccacctacacactttgcagaaactctcttccggctctcctctctctccctggggccaatgaggtttcagagatgcattcacagtcaaagccacttgatcctctggaatccagagtgtcctcggcaggggatgcttttgtaggtggccccagttctctccctgctccccccaacacatagacacccctgagcctggcacctcctcggctagagtcggttgcaccctctctaacctcttccccccgccccgttcctctgtaaaaccagacttaaccgttctcagtcttgtctgtggctccaggacggtatcactcaataagtgtgttaggatcaaaggaatcatcacagtaaccctatatgtatcagggaaggcaagatgtggtcatccttactttatacatgaagattctagttctggaatctttcctcaaatttcagagaagtgaatataagctaaaagcatgtctggagttccctggtggctcagtaggttaagagtctgatgttgccactgctgcagtgtgggttcgatccctggcctgggaagaagctcggatgccctttaagatcctggggttttttttgttttggctctggctctggtgtaggctttgaacttggagcccaggctgatcaaaaagggacaaatatagtgggtattcgtatatgacgccagtcgggaacatgatcaaggagaggatgacttgctcttaaatagggctggggaagggcttcaaatgtacttcaaaagggagggagaacctatagcttaagagattgaaaagaacctatagcttaagagattgaaaagacagagcaactgcagacaacatggtggctttgaatttgacattgaaccaactgactacaataatatacattgtatatttatatacattaatatatgtatttctattaaggaataagggttaactctttaggtatgacagtgactttagagttatgatttttttaaagtcattatcttttcaagattataatttgaagtgctgatgaaccaaatgagaaattagtattaaaaataatccactgtaaggagttccttggtggctcagcaggttaaggatctggcattgtcactgcagcagctccagctgctgatgaggaacaggtttgattcctggcctgggaactatcatgagctgtgggtgcagccaaaaataaaaataaaaaaaactgggttcctgtcgtggcgcagtggttaacaaatctgactgggaaccatgaggttgcaggttcgatccctggccttgatcagtgggttaaggatccggcattgccgtgagctgtggtgtaggttgcagacgtggctcggatcctgcattgctgtggctgtggcgtaggctggtgactacagctccgattcgacccctggcctgggaacctccatatgcctcgggagcagccctaaaaaaaaaaagacaaaaaaagaaaaaaatcaaaaaaacccactatggagggaagtgacacaaatgagttggtcactgtcaaagttcggggtctgggtacatgagagttgattgtatcattttgactttggttttttttttttttttttttccttgtcattttagggttgcacctgcggcatagggacgttcttagggtaggggtcgaatcggagctgtggctgccagcctacaccacagccacagcaactcgggttctgagccacttctgtgacctacaccacagctcatggcaatgccgatccttaacccactgagcaaggccagggatcaaacccgcatccttatggatcctagtcaggttcgttaccgctgagccacgatgggaactccaactttggtatatgttttaaattttctgtaacaaaaggttttaaaagttgtcttaaagaaaataagactgaaggaaggtagctgaccaagccactggcccttattcccctgtgtttgacagagtctgcagaagggtacagatgtgaaagatgtggaaaagtatttacctacaaatattacagagacaagcatctcaagtacaccccctgtgtggacaagggtgacaggaaatttccctgtaatttgtgcagacgatcctttgagaagagagaccggctccggatccatatccttcacgtccatgagaagcaccgaccccacaaggtaagagtcaaggtgatccctgctctcaggtaagagtgagcccacccgccactccaacactgcttttcctgtttcttcccaaacccctgagcacataccaagggcctcctgtatacaagttgctgggacccaggcctgacaggacagagtctgtggagggcagaaagcagaagaaaaaggaaactctcatcagctggacaaccatttgcacgaaggggttaatttcatggttactggcgctcattgacacaagttctgtgttctacaatcaacgggccctgggttttaatgctatagagctctctcggtcaacaacagtagccttaataaaaagggacatgattgacctgttgctctagctgggtttgggtggcactggttaaaacagtggctcttcaatggctaagatcaccagggcagggggggagtggtctagtcaaaaatgcagattgacggggttcccattgtggtttaggggaaatgaatctgactagcatccgtgaggatgcatgttcgatccctggctttgctcagtgggttaaggatccagcattgctgtgagctgtgatgtaggtcacagatgcagctccgatctggcgtggctgtggctgtggtgtaggccaatagctatagctccgatttgaccccaccaagtcagggggtgggaggaagcttccatatgccgcaggtgccaccctaaaagacaaaatttttttaaaaaaaggcagattgacaatcccagaaagtgtaccatgatgtccgggtgtaaagactgagatacctggttgatgggggacagaggaactgtgtcctcctagctggacacatgggttatgaaaagcttcatagacaggtggctgagagctgagtctcgaaggacaggagggtgtctggtttatattggaggcggagttggttggggaggggaaagggttgagacattcccggcaggaaaggagcctggcccaggggtttaggttactatacctggctccgtgatgtgtgcaggcgctccaggcgaggatgaagcataggcgaggtccaaaggatggatggcctctatggtgtgccagggactttgtaaggaagaaaggcaatagtggccttagggagccattgtccaccattctggatacctggtcactttgccaggtttggtgcaagagtgccggctaccattggtcctaattaggagaaagaggatggggcttgggtgcagaaagatggattgggttgggttccctcgctgtcaggactccttgaagccccagttttttgttttttcgtttttttttgtttttaatttttttaaattaaattacagttgaggagttcccacctgtggctcagtggttaacaaatccgactaggaaccatgaggttgtgggttcaatccttggcctcactccctacaaggccccacagccttataaatcaactggactttattttatttttatattttttgtctttttgccttttctagggccgctcccatggcatatggcagttcccaggctaggagtctaatcggagctgtagccgctggcctacaccagagccacagcaacgcaggatccgagccgcgtctgcaacctacaccacagctcacagcaatgctggatccttagctcactgatcaaggccagggatcaaacccgaaacctcatgattcctagtcagattcgtttccgctgcgccatcatgggaattccaaaggatgtttgtttaaaaagcacgagctagagttcccttatggctcagtgggttaaggacccagcattgtcactgctgtggcatgagtgcaatccccaaaaagctcaagctacaggattagtttgggtttgtttcgttttgctttctggctagagtagagggcaggaaaatgttatatgagtcagataaaaaaatgtccactcggatgttatgtgggtcatttgcctaaacactgaggatcatggtgactcttggtttggggttcgaggaagggcagatggtagaccaggaggtcccacagataacaggaatgatagaaggggtggaagttggtaataataacctgggcttcaagagaggagttgtcttttttatcttggtttgggtttggagttttttttgtaattttttactgtgttgtcttaaactcagtgttctgaaatttggtcagtatcttcctgagtggtctgacccttcctcatgactatagataccttttaactctgggtttcagatcgagcaaaaattcttcttaaagatttttttattttaggagttccagttgtggtgcagtggttaatgaatccgactaggaaccatgaggttgtgggtttgatccctggccttgctcagtgggttgaggatccggtgctgccgtgagctgtggtgtaggtctcagatgcagcttagatccggcgttgctgtggctctggtgtaggcccatggctacggctccgattcgacccctagccagagaacctccatgtgccttgggaagcggccctagaaaaggcaagaaaacacacacacaaatttatttatttatttgtttgtttgtttttatttttatttattcatttatatttttttttggtctttttgccacttcttgggccgctcccacggcatatggaggttcccaggctggggtcgaatcagagccttagccgctggcctacgccagaaccacagcaacaatggatccgaaccgagtctgtaacctacagcacagatcacggcaatgccggatccttaacccactgagcaaggccagggatcgaacccgcaacctcagggttcctagtcagatttgttaaccactgcgccacgacaggaactcccacaaaaatttattttaaatgatttttattttttccattatacttggtttacagtattcagtcaatttctgctccacagcaaagtgaccagtcacccagatagatacattctttttctcattatcctccatcatgtcccatcataaggtactggatatatagttctctgtgccctgcagcaggatctcattgttcatccactccaaatgcaatagcttgcatctattaacccaagactcccagtccatcccactccctcccactcccccttggcaaccacaggtctgttctctgtctgtgagtctctttctggtttgtagatatattcctttgtgtcctgttttagatcccaaatacaagtgacatcacgtggtatttgtctttctctgacttacttcacttagtatgctaatctaatctctaggtccatccatgttgctgcaaatggcaaatcttcatccttttaatggctgaataatattccattgtacatatataccacttctttatccacttatctgtcaatggacatttaggttttttccatgtttatatagtaaaaaatactgctgtgaacataggggtgcatatacatatatatctttttgaattatagttttgtctgggtatatgcccagagagctcacatatattttagttggatatgtaactttagatagaaataatttcccatggaactttcaaagaatcattccattttcttctagcatttgttgccaatctggttcttatttctctgtaagaaaccagtttccgagctttgtgaaaattgttctttaactttggagttctgaaattttaacaaaatgtgttaaattagatgtctttttctttctttttttcctcttgctttgtaatcagtgaaagacaaagtattctttccattgggagacacaagtcctaagcgcaaaggaattcttttttttgcccttggctgtcatctgtcttcaggtttttgttctctcctgggatctttttggccaaatattaggttgaatcagcctccctgtacttaacttttaatttttttcattagcatttctctgagagttccccagccttattttaattttatattatttggcctcatcatgcagcagcttgatgtgggatctcagttaccagaccagggattgaacacaggctggagcagtgaaagcaccaaatcctaaccactaggccaccagtgaactccttacccacccttattttattttatttattttattttattttattttattttattttattttattttattttattctattttattttattctattttattttattctattttattctattctattctattctattctattctattctattctattctattctattctattctattttattttattttgtctttagagggctgcaccccaggcatacggaggttcccaggctagggatctaatcagagctgttgccgctggcctgcaccacagccacaggaacacaggatttgagtcgcatctgtgaccttaaaccacaactcacggcaatgccagacctgctgtgccatgacgggaactccacacccttagttttttttacatcagatatttggtttttaggagttcccgttgtggcgtagtggaaacaaatccgactaggaacggtggtgttgtgggtttgatccctggcctcgctcagtgggttaaagatccggcgttgcagtgagctgtggtgtaggttgcagacgtggctcggatccggctttgctatggctctggcataagccagcggctgcagctcggattcaactcttagcctgggaccctccatatgcctcgggtgtggccctaaaaaaaaaaaaaggattctcgacctttagctgtcagctgagtccattacatacactatttctagtctatacttttttgttgtttattttaatttccaagagcagattcacgttctaattgctgcccttttataattgatctactctttttgcaatattaattcaacatctgaccttttttgcttaactaacgataatacatgttcattattagaacttcatagtacagaaaaattagagaagactttaaaaatcaaacccatggaaggagttcctgttgtggttcactggtaacaacccgactagtatccttgaggacgaaggttctgtccctggccctgctagtggattaaggatcccgcattgctatgagctgcgatgtaagtttcagccatggctcagatctggcgttgttggttgctgtggctgtggtgtaggccagcatctgcagctccgatctgaccccatatgccacacctgcagccctaaaaaatatataaataaaaaataaaaatcaacctcatggagttcctgctgtggcccaatgggatttggcagcatgtctgcagacccagaacacagactcgatccctggcttggcccagagagttgaaggaccccatgttgccacagctgtggcatagtcacatttgtggctcggatctgatccctggcccgggaactctatgtgctgtgggtggcgaaaagaaaaaagaaaacaatttttaaataaataaataggagttcccgtcgtggcgaagtggttaacgaatccgactaggaaccgtgaggtcgagggttcggtccctgcccttgttcagtgggttaacgatctggcgttgccgtaagctgtggtgtaggttgtagatgcggctcggatcccgcgttgctgtggctctggcgtaggttggcggctacagctctgattcgacccctagcctgggaacctccatatgccgagggagcggcccaaagaaatagcaaaaagacaaaaattaaaaaaataaaaaaatagataggtagatagatacaattcaacctcaaagtcccatcatctaaaatacccacttttcagagttgccatcatgatgcagtggaaacgaatctgactaggaaccatgaggtttcaggttccatccctggccttgctcattcagtaggttaaggatcgggcattgccttgagctgtggtgtaggtcgaagacatggcttggatcctgtgttgctgtggctgtggtatcggccagcagctacagatcggatcagagccctagcctgggaacctccatatgcgtgggtgcggccctaaaaggacaaaaagacagaaaaaataaaaaataaataaaaactaaaaacaaattaaaataacccgcttttccgctcgtgcccataaggacatctggggagcagggcacagagacacagtagattcctttactggttcagaattgctgagaagatttgacaggaggcatcagagtcaagagcacagagaaatgacaggaactgttcatagcaagcggatcccccaaatactacctttttcttgtaggtacaggtcttgggtcttctgccaggtgcattgctatcatggtctccacatttggccccacccgcactccatatctgtacagtattgagaggttccctataaacgcttgttgaattcattgctaggggcttgcaatttatttatttattgtttttttagggctacacccacggcacatgtaagttcccaggtttggggtcaaatcggagctgcagctgctggactaagccacagccagagcaacataggatccaagccatgtctgtgacctacaccaaagctcagggcaatgtgggatccttaacccattgaacaaggccagggatcgaacccacatcatcatggatacacatcaccaggttcgttactgcggtgctgccacaggaaccctggcttacaatctattcatagcctgtgaggaagtcaggataggtattttgcccatgagacaaatcggggaaaccaagattccaagttgaactgagttgttctggtcacacagctactcgttggagcaggataaattcaggcctctcttataaccccagtccttgtcccttcccacattatccgttggaagcagctgacacccaaagactccacccatactgaacagcctctggaccagagtcagtgtgtccagattctacctgttatcttctgccttgggatgtacacagaataaatacagcagttcgctccccctcagataaacataatggtgatattagcctgttaagggaaaatgtggtttcaactgttttcttttctttttttgtctttttgccacttcttgggccgctcctgcggcatgtagaggttcccaggctaggggcctaatcggagctgtaaccgccagcctgcgccagagccacagtaacgcaggatccttaacccactgagcaaggccagggatcgaatccgcaacctcatagttcctagtcggattcgttaaccactgagccacaatgggaactcctcaactgtttttctttttcatcttagtgttctacgtgtgggaaatgtttctctcaatcttccagcctaaacaagcacatgagagtccactctggagacagaccctaccagtgtgtgtattgtacaaaggtaagtggatctttctcaattttatttctttactttttgggctgcatccaaggcatagaaaaattcccagcccagggatcaaacctgcaccacagcagtgacaatgccagattcttaatccactgagccaccagggagctcttgaaactttttttttttttttttttttctttttaggaagcatatggaagttcccaggctaggggtccagttggagttacagctgctggcctacaccatagccacagcaatgtgggatccgagctgtatctgtaacctacaccacagctcacagcagtgccggatccttgacctcctgagtgaggccagggattgaacctgcctacttatggataagagtcagattcttaacttgatgagccacaataggaactcccctgcaactttcttttaaaagctcctcctagcaaataaataaataaataaataaataaaatgtaaagggagttcccgtcgtggcgcagtggttaacgaatcctactaggaaccatgaggttgcgggttcggtccctgcccttgctcagtgggttaacgatccggcgttgccgtgagctgtggtgtaggttgcagacgcggctcggatcccgcgttgctgtggctctggcgtaggccggtggctacagctccgattcgacccctagcctgggaacctccatatgccgcgggagcggcccaaagaaatagcaaaaagccaaaaaaagccaaaaaatatataaataaataaaataaaagctcttccttgagtcttattcgggtgtccatggataagaacttgtaccataaagcctggctgataatgagttcttggtaaattaattcattgtcagcccaatccccatttcctccaccatataggctcatgtttgcttacgatgatcagattcaacctcctgttgccaaattggcatttagggaatgtgtcataaattagaccctaaatttacagagacctgtagcagacatgattaggtagtatttcagagcatggactcttaagtgctgctgatattattgtagtgataaattgatcacacacacacacacatatatatatatatgatgatacatactattttggttatgtattatatatacctgtgctgtctatttagccattaaccgtatgtggcaatcaattttttttttttttttttttttttttttttgtcctttgtctttagggctgcactcacagcatgtagaggttcccaggctaggggctgaattgagctatagctgctggcctacatcacagctacagcaaccccagctccaagcctcatctgcggcctacaccacagctcatagcaacgccagaacctcaacccactgagcaaggccaggaatcgaacctgtgtcctcatggatactagtcggctttgttaactactgagccatgatgggaactccaaaattttttttttttaatttttttaatatagctgatggtagttggaaattttagtaacttggtggcactggccacatttcaaaggctcagtagccccagtcttggttgctggtgaccaccaaattggatagcactggaatttgttgtttctatcattgagtcatttatatttgttaataataatagccgtaacaggaatataggctctcttaaggtgacttctaaacttccctaagaggaataaaacaggaataaaagtctaccaggggagttcccgtcgtggcgcagtggttaacgaatccgactaggaaccatgaggtcgcgggttcagtccctgcccttgctcagtgggttaacgatccggcgttgccgtgagctgtggtgtaggtcgcagacgcggctcggatcccgcgttgctgtggctctggtgtaggccggtggctagagttccgattcaacccctagcctgggaatctccatatgccgcgggagcggcccaagaaatagcaacaacaacaacaacaacaacaacaaaaaagacaaaaaaaaagacaaaaaaaaaaaaagtctaccaggcgtggagttcccgtcgtggcacagtggttaacgaatctgactaggaaccatgaggttgtgggttcggtccctgcccttgctcagtgggttaacgatccggtattgccatgagctgtggtgtaggttgcagtcgcggctcggatcccacgttgctatggatctggcataggctagtggctacagctccgattcaacccctagcctgggaacctctatatgaacctccatatgcctcgggagcggcccaagaaatagcaaaaagacaaaaaaaaaaaaaaagtctatcaggtgtagggaaaggaattccactaaagaaattgtgtcaatagaatggaaataatccgtgtagaaaaagggagttccctggtgtctcagtggcttaaggatccagtgttgtcactgctgtggcacaggttcaatccctggcctgggaacttctgcatgccataggcacagccaaaacaaatgaaaaaaattaaaaaaccagggctgacttacttactagaccatgtggaaccagcacctaaggcaagcggccatggatttgggtggacaaggattcaatctgagggataaatgctctgctgcaggatttccagagcagggacagaatattccagtgcctctcctattcctggccttctcattctgatcctcaccttggacttgtagttaacctgggaactagagatgcctgcaaggggggaatcaatgcccttggggcatcaatgaactgtttggcattctgacctctgtgtgagactctggtacttcagctgctggagactgtccttgtctgggcatcctggcacctatacctgtgctccttactgggcagtggcccaaccccacatgtgccctgataccccagcattgagtgcttttctcctagtccctgctccccaaacccaaggtcactgatttaacctagtgttttgttatcactgtcagtgcccccctcatggagtcattatatctctaataaatatttgaaaattacaaaggtcgagcaaagtactgaagtgaattaggggaaaagttataagtaagggaaagaaaaaaaatgataacaaaaagacacaaaaacaacaaagtactggagttcccgtggtggctcagtggaaacaaatccgactaggaaccatgaggacttgagtttgttccatttgccctgaaaagacaaaaaagtaaaaaaacatttaaaaaatttcaaaaacaacaaagtacttgggaatctaaaatggttcacagccactctggagcactggcagtttctttaagaactaaacttgtaactaccacacaacccagcaatcgctcttctgggctcttatcctagagaaatgaaggtttatgggttcacactaaaaactgtacacaaacagcagctttggagttcttgtcatggttcagcggaaaggaatctgactagcatcggtgaggacacaggttcgatccctggcctcactcagggggttaagcacccagagttgccatgagctatggtgtaggtcacagatgcgcctcagatcgggtgttgctgtggcttaggccggcaggtgcagctctggtttgacccctagcctgggaaattccatatgccatgggtgcagtcctaaaataaataaataaataagatggtcattatgtgaaaggattcccccacatccccaaaaaatatatagcagctttattcatagatgccccaaactggaaaaaacctgagtgtctctcaatggctaagtgattaaacagacagcagaacctcacactgtggaacacgcttcagcaataaaaaaggatgagctgtctgtacacaaaactgccttacgaatctgcagagaattatgccgcgtgcaaacggcccatccccaaaggttacatacagtatatgcttctgtctacaaagccttcttgaagtaataaaattccagaaatagagtacagattagcgattgccagggcttaagaaaaaagtaggagtaggagggaactaggtgtggctgtaacagggcaatgtgagcatccttatgggagttcctgtcgtggctcagtggttaaggaatccgactaggaaccatgaggttgcaggtttgatccctggcctggctcagtgggttaaggatccgacgtttacgtgagctgtggcgtaggtcgaagacgaggctcagatcccacgttgctgtggctgtggtgtaggccatctgctatagctctgattcaatccctagcctgggaacctccatatgttgcggaagcggccctagaaaaaggcaaaaagaccccccaaaaaaagaaagaaaaaaaaagaaaagcttacaaacaaaaaacccaaggtccattgattggtgaactcagaacaatgaaattaaaattaaccccttgttgtccagctgatgaagttgtccttttttcttctgctttctgttctctgcagaagttcactgcctctagtatactccgcacccacatcaggcagcactccggggagaagcccttcaaatgcaagtactgtggtaaatcttttgcgtcccacgccgcgcacgacagccatgtccggcgttcacacaaggaggatgacagctgttcctgtagcatctgtggcaagaccctccccaatcaagacgctttctatgcccacatgaagtttcatgaagactactaactagcctttagagattttgaggatatttcttgtttatgggtgtgtcttgtggggaaaagtgatgcttatattgagatgagacacagagtagtggaactgaccaattagcagaatttgccagagttcttggttgtggtattaacatcctttgcagaaatgttttttgttttttgtttttgtcttt

SEQ ID NO: 4 - protein, 571 aa, Sus scrofa
MALRLPGETGPQDKECYSPDRLQSSPQHLAAYYTPFPHYGHYGNTLTTAEEGFQPFRQLEALSASPALPPFAFRTAPPLLSPGLALPREPLYDVPWYSKLPTWYPIPHLPREVPHFLNSPREFTGAPAENLGQVGGRSDGGQCWGPEVFLPPPPVDASLLPERPKPSQLLPGSPGERSEDGPKLVNQERKASPRYHFTQEDLHLVLYGVIPSPQHPARLHHAMSGLLVPTNSSGSDSLPQTLDNSSLQLPEGLCLRQTMFGEVAHFGVFCNSLVAKGVRFGPFQGKVVNASEVKTHGDNSLMWEIFEDGHLSHFIDGKGGAGNWMSYVNCARFPTEQNLVAVQCQGQIFYESCKEIHQNQELLVWYGDCYEKFLDIPVSLQVIKQGKQASGPSEESAEGYRCERCGKVFTYKYYRDKHLKYTPCVDKGDRKFPCNLCRRSFEKRDRLRIHILHVHEKHRPHKCSTCGKCFSQSSSLNKHMRVHSGDRPYQCVYCTKKFTASSILRTHIRQHSGEKPFKCKYCGKSFASHAAHDSHVRRSHKEDDSCSCSICGKTLPNQDAFYAHMKFHEDY

SEQ ID NO: 5 - DNA, 18422 bp, Bos taurus
atggccctgcggccgccgggggaggccggcccccaggacaagggatgctaccctcccgactggctccagggcagcccccaacacctggccgcctactacacgcctttcccgccctacggccactacgggaacaccctgaccgcggcagaggagggcttccagcctttccggcccctggaagccctggcagcgtccccggctctgccccccttcggcttccggaccgcgcctcccttgctaagccagggcctggccctcccgagggagccgctatgcgacctgccctggtacagcaagctgccgacctggtaccctgttccccacctccccagggaggtgccgcacttccagaacagcagtcgtgagtttaccggcgccgccagcgaggacttggcacacaccgccggccggagcgacggtggccagtgttggggacctgagattttcgttccgccgccccccgtggatgcttcgttgttacctgagaggccgaagccctcgcagctgttatcggggtcccccagcgagccctctgaggatggccccaaactcgtgaaccgaaaagggaaggcttctcgccgctaccacttcacccaagaagacctgcacttggttctgtacggggtcatccccagcccgcagcactcagcccgcctgcagcacgcgatctcgggcctcctgatccccaccgatagcgccggtaaaggcgggccccataatgcgggagtcgggggcaactggaagagaggtgggagcaggaggcggaaggggcgcttctaggtggatcccaggcagtgcgagtgctgaaggggagggtgtgtgcttccatcagaagatagagctggggaggccaggctaacctccgaaaccctacccgcatgactcttaaggttgttttgcttccccggtgccaatgcaggggacgcgtgttccatccctgaatggggaagaacgcctggagaaggcaatgacaacccactccagtattcttgcctggagaatcccatggacggaggagcctggcgggctacagtccatagggtcgccgagtcagacacgacttaacgattaaacaaggttgtcttaagagaaatggctcatgctgtgtgtgggctgatcaggtgggctcaggttctcccaggatgcccaaggtgtctcagtgagagccagctgccatccactctgggagtctccctccagccatctgaccttggtcaaaatcagcattacctctgattctccagttccttgaatttgctaacaggggttaattaccacctaaccagctagggtccttttgagtctaaaatgagacactgcatatgtaaaaggaaccggaagcctcgaagggtcaaatggtaagctctagagaatgaggaggaagacacgttttataataccttttatttaaaaaataagagtttaatcctgtctttttctaggggctgattctcttcctcagactctggataacgactcccttcagctaccagaaggtaggcagggctcctggcttggatttttttttttatttaatggcggtaaacacagtaggtttcttcactggctttctttcctgccctgggtctcctgctaggtctctgcctccagcagacgaagtttggtgaagtcgcacattttggggtgttctgcagtagtcttgtggccaaaggagtcaggtttgggccctttcagggtaaagtggtcaacaccagcgaagtcaagacacacggagacaattccctgatgtgggaggtaaatttgtttcttatgggttgtcggaaagtggggaggagggtcgctggggatgaagcctggcctctgcccctctgggagaggggaccctctcagcagtactcagctgtctagtgctgtctattttgcaacataaagagaaaagtaggcaactgcagagccgctagggatagcacctccacatggagtctgtgtatcttttcagtgccttaaggcattttcatatgaagattagccccagaatacaaagagccaataccctgggttatatttacagacaaaacaaatactttaaatattaccatgtgatgctaagaatatgtccaaaaggacaaagaccagatttaaaattttttgatatcatttgtctaatggggatttttaaaaacagctattcttaactctgtatgaggcatgatggtaggactgcagtatgtcagactgtatcagattatcctcccttgccctgaattttgaggaatacactttaggaaaataatctgaaatccagacttcccagaatctgtttgtaacaccaaagcatcaaagactgcagaattactcactggagagaaagaattaaattatatctccatcaatacacacgaaaactcatttgagataaaataccaaacaaattggttgtcttgaactgatagaattaaatgtaacctcctgttccctttgcttctgtttatgaagttaatatatgctcaccctagaaacttgggaatcaagaggtgataaaagtagaaaccttttaaaaatgtcacaccacctagacagatatctttcagctgataaatccatttaggcttaataatattgataataaatatattcaaagagatcaagcgtgagatttgaattgtacatttttaatatgtaaatttattttctatgtcaaaccaaaagaaaaataaaagatacatttctaaagtttgtttgattccatttagatctttgaagatggtcagttgagccactttattgatggaaaaggaggtgcagggaactggatgtcctatgtcaactgtgcccgtttcccgtcggagcagaacctggtggcagtacaatgtcaagggcagatcttctacgagagctgcaaggagatctaccagaaccaggagctcctcgtgtggtacggagattgctatgagaagtttctggacattcccgtgagcctgcaggttctcaagcaggggaagcaggcatctgggtcctctgaaggtgagtgcacacctttgcctcacccagtgaggtcctcttggtcgaaggactgggctctttgcccagaccagcaccttcctgcagcttctccacttgcttgtggaacttctgcctcccagctctaatgtagaaccccgaactcaagggcgtctctagccacatgagtcttgccagctggaggacgatgccctcctcttcccaaagctgctgacgctactgctgttcaccaggatacctttatcttctaccctttcacccgctcccagagaataaaataaaagtgaaataaatggatgcaacctctgccttagatgagccagcttctgattcatctctgcagaggctcacacaactcaggaagtcactgttttttcattaaatttttttttttttttaattaagcttcttattttgtattggagtatgaccgattagatcttccctggtggctcagtggtaaagaatctgcctgcaatgcaggagacacgggttcaatccctgagttgggaagattcccaggagaaggaaatggcaacccactccagtattcttgcctgaaaaatccccttcacagtccatggggttgaaaagagctggacacaactcagtgactaaacagcaacagcatggctgattaacaacctcatgatagtctcaggtggacagcaaagggtctcagccatacgcagagcactgcttttcaaatggtggcttgcaatatgttaatagggtgggaaatcagtttggtggtagagatcagcattaaagaagaaaaaagaataagaataaaatagaacagaaaatattgatatgaatctcacttaagcattgtttggtgaggcttttgtttcacatggatgtgtgtgaaccgggtctcaaatagaaaatgtttttcttactgggtctcagtccacttagaggagcatggagctagactcttgctctccagttttagtgttgtgttaacatgtggggccctttcggaaggtgcagattctcattccaggatgggagattttgcatttctatcaagctactaggggatgctgctgctgctgctgctgttccctggaccagatttcagtagcagggagctggaggaccatcaacccactcgctggggatttgcattttaaaaaagctctctgggcggttgatttttataaccacaaaagcctgggaaccagtcatctcatacgtgggaccagacaaatgcaaattaatatgtgaaccaggtagaagaccatcctgttctgttaggatagatgtcataagcagcaggtaaaagagaatgtgaattgcattcatcacactgcagtgatggtctgcatgcatgtctcccctgctagactgaaacccttcagggctggagacaactgtaaacaccttaatagctcctgctctgaattccttctgtattgaaggaaggtggaagactagactagattggggaaaactgcttagggatgtggtgaattaagggatgagttttgggcttcccaggtggcccattggtgaagaatctgcctaccaatgcaggagactcaaattccatccccaggtcaggaagatcccctggagtaggaaatggcaacccactctagtattcctgcctggaaaatttcagggagagaggaacctggagggctacagttcatgggatagcagagagacacgattaagcatgcacgcatgctcaccacagtttaggcagggaaaggcaagacaatccaggcttggggatatagtgaagccaagggcaaggatgtgttcaccagggattaagaggtgaacaatgaacagtctctttctagaggccaaataatgaggggttgttgaactgtcttctcagtaccccagcttatggatggtgtggggatgagggtgaggggtgagatggcagaattctctggggtctggacttcacagttgccccgtagttggcaccaaaccaagcctttttagtcacttcccaagaggtaccaagcactgctgaaatagaagtgccaaatggatttgagaaagatacatgcttgacaactcacaaaatagaatcattatctttttgaaaaggtattcagcactatgtatcagagctattaaaatgttcataacctttgatgtatcagtaatactcttctggaaatttgtctttaggaaatactccaataggaaaagctttgtccatagggatttttaatacagcatcattcctttttgtgaaaagtcacaaacaaatgcccaatagtagaataattattaagtaaatcataagcaccagggataagggcttaccatggtcagtggggtggggagaaacaccagcaggtgtagtacctggtgtagtacccacctgtactacacttctttctttttttaaatatttatttggcttcactgggtcatagttgtggcatgcaggttctttagcagaacttgggatctaatgccttcacctagggaccgaacccaggtccctggcattggaagcatagagtcctagccactggaccaccagggaagtcgctgtgttacacttctgaaccaaattacatctggataagttcatggctttctgttaggaagaatggttgagaatagaattaaaagaaatgaaaaatcaacattcttctgtcctctcagaagaaagtttttgtgttttatccaaaccttttcttgagacttggtaggagccttcccctttaaggtgttgagtgggagggaagggccctatgtgggcgggttatctagagtttgcaaacctagagtttgcaaagtttgcaaaccctcagtgtgttttgggtggggggcagggggtggtggtgagggtggggaatgtgtagatagttcttagtcactacccaactctatctaaagagttgtctaggtggcaaacccgcagagtgtgtgttttgggcggggggtggggaatgtgtagatagttcttaatcactaccaaactctatctaaagagttgtctaggtggggcagaaagcatcattttcagtttcaggaaaccatttggctgaaaaaaattgaaatgggatggaggaggaaggaaaggaaacaggacaaaattaggttaagataaaatttccaagaacctgagctgaaaacgtaggcggctgaagcctaattagtaagggtgctgtgtcatttctgcctaagtggtggttcttatgcaaattgactattgtgcccctattctgaattttggtgtgccttagggctttaatttgtaaagactcgctgaccctgtcttgtagacaacccccttcccaccccggaagctggaaggccaggtatttctaaccaatgaaaattctagcttcgagcaaaaaccgtcctagcagggaggttctgagagcattagcacctcaatgaaagcggtagacgagactgagcaatggatcgtcctggggctggtggctgccttcctgcttatttacttaataaatgaaatgatttctttccttggccacctgttaaatgtgcctagcatgcagttgttgactaacaaagcccccagtggatagctttcctgcttccccaagctgactaaaaaacttccacctacacactcttgcatgtactcagtcttggctactctctgcctccctggagcagaggcagtgaggtttcattgatgcattcataagcaaaaccacttgatcctctggaatccagagtgtcctcagcaggaacgcttttgtaggtggccccggtccttccccttcccaccccaccacatagacacccctgagcctggcatctcttctgctagatttggctgcaccttctctaacctctccccaacctctctcctcctctgatgaaaacggagttaccttcctcagtcttgtctgtcgctcagtgatagagtcacttgttggtttgaattcagtgtcagggttaaattaatcatgataatcccatgttttagttctggaatcttccccgaaagctcagagaaatgcattgttagctaaaagggtacctaagtctttgtaagtgaggtccaatggagcagcacttaatgaagcctgggaagaagctctgggtgcccatcaaggcccccaaagggtgaactgcttgaacttgtagctcagtctgatctgaaaagcacaaatacagtaggtattcggtacatgaaccttgtaacacaggccagttaggaagtaactataagactgacttgctcataaatagggctggaggaagggtgtcttcaataaatatatttcaggaacaaaaaggaaaaggaacctagagattaagacattgaagagacatagtaactgtggacagcatgtggactttgaatcctacgctgaaccaactgactgaaaaataaacaaacataagtgcgtgtatatgtattataaacaaatatatatgtgtttctatctattaaggaataaggttttgacaattaggtatgacagtggctttatggttatgcttttcaaaaagttgttatcagggacttgcctggcagtccagtggttaagactgcacttcctctgcaggggatgcgagttcgatccctagttggagaactaagatcccacatgccaccctgctccccaagaaagtcattatccattaaagattgtgggctgaggtgttgatgaaacaagtgagaaatcggtattaaaaataatctgttgggggaagtgatgtgagtcagtcactgtcaaagcctggtgtttgggcccaagagggtttattctattattttgactttggtatttgtttaaaagtttttgtaataaaaggttgtaaaagacggtcctaaagaaagtaagaatgtgggaagatagctgaccaagccacttttccccctgtgtttgacagagtctgcggaagggtacaggtgtgaaagatgtggcaaagtatttacctacaaatattacagagacaagcatctaaagtacacgccttgtgtggacaagggtgacaggaaatttccctgttctttatgcaaacgatcctttgagaagagagaccggctccggatccacatccttcacgttcatgagaagcatcggcctcacaaggtaagagttagggcagtgacccatctctctctagcagtctgctttcaggctttttccccaaacccctgggtgcaccccgagggcctcctgggtgcaagttactgggatgggaggatgggacagggtctctgaaggaagtggcagtgctgtgaaagggcagacatggacccaatgtgatggtccatggaccaagacatgatgcctgagtgttgaagctggcggatgcatggtagacaggggcagaagacggtgtctttctacatgtgggccatgaaaggcctcatagacaggtggccgtgagcagaacctaggactgaggaagtgtctggtttatttggaggtggagttgactgggggttgcgggaagggttgagacatcccagttgagaaagaccttggcctgtggttttaggtaaccacaccttgttccataatgtgttcaggctttttttttttttaacgttttattgaagcatagtttggtttacaatgttgtattaatttctgccgtacagcaaagtgactcagttatacacatacatacatttgttttcatattattttccattatggtttatcacaggatattaaatatagttccccttgccatacagtaggactgtgttgtctatctgtcctatatacactaggttgcatcagctattcccaaactcccaatccttcccttccccaccctcttctccgttggcaaccataaggacctctgtgtctgtgagcctgtttctgttttgtagataacttcgtttgtgtcatattttagattccacatagtagtgacatcatatggtatttgtcttccgctttctgactttctttgcttagtatgataatctctaggtccaatgtgcaggcatactgatagttacaggcatggtccaaaggatgggtggcttttgtgccatgccagggactttgtaaggaagaaagaaacactggtgcattggggagccattgtctaccattctggatatgtggtggctctgccagacttggtgcaagaaagtgctgactaccactggtcttaattaggataaagaggatggggcttgggtacagaccgacagattcagattaggcttcagtgctgtcaggactcctgccagccccactcttcatttgaagaaataaaactgctcttgtctctccccttctgttcacagtgaagctcctggaaatatcacaatcactgttatatacagctgtaaaatctgagtatttttacaatgatctcaaattgtttttgtaaatctaagaaattttaaattattaagacagtgaaatcatttctcaccttttgttgtttggttgctcagtcatgtccaactctttgcaaccccatagactgcagcacaccaggcttccctgtcctccactattttccggagtttgctcaaactcatgtcctttgagtcaatgatagcatccaaccatcccatcctctgttgcccccttctcctcctgctgccctcaatctttcccagcattagcatcagggtcttttccaacgagtctgctgtttgcatcaggtggccaaagtactggagcttcagctttagcattagtccatccagtgaatattcagggttgatttccattaggattgactggtttgatgtccttgcagtccaagggactctcaagtcttctccagcatcacaattcaaaagcatcagttctttggtgctcagccttctttattctcagctatagattggcagagtaaaaagttatactgtccagtattctacatgtaaatcaatagggaattggttatgtaaagtttggcttattaagcacaaacaagttgtaaaatatgtgtggaatgatgtcacttagaaaatcatgtacactgtatataatgtttacatataaatggaaacacaattggaaagaagccattaaactccagtctttctgggagtatgatagagaataaagccaagcatgatttttatgtcttcacttggtaaacttaaaattttattttttatctgcagttttttaacatgagaaaacaatatacactagagataaaaagaaaacaaaaaccactagatatgttatggcccaaagttattttaggtataatttttttctatatgtgtatgtatttttaatacgcttggggtcatactgatgttatgtacttaaaaatctactgttttgtgcatttccccccagcatggctgcagtgaacaatattatctataaatcactctgtttttcatttctgattatttctttggggtacagtcctagaagtagaaagattgagtcaaaggtacaattttaaggcacttgaattaaggtaccacacacctttccaaacagtccaaccagctgggcttgcagtgtgtgtagtcagtaaccccaagtctcccacaatattatccttcttatgttcacatttttatagatgaaaaatggtatcttgcttggctttgcatctttgttatttatgaggtttacattttattaaaatatattttctgagacctcccctggtggttcagcgattaagataaagagtaatctaaaaaataaaataagatatattttcttggctagtttgtatttgtcttgtggtttgtcagtttatgtctgaaattttaacagagtgtgttcaatgtttcttttctctttccttcctttttttttcacccctgcctgctttgtagtcagtaaaagacaaagtattctttccgtctgaaggcacagagcctaagctcagaggaattctcctgcactttcggggtttctttttcagcctgcagaatcttagttccccaaatagggactgaacccctacccctgctgtggaagcttggagtcctcaccaccagggaaggccctctcttgtactttccttggctattatctatcttccatttttgttctcttcctttagccaaatgttaggttgaatccacttctttgtattcattaacctttactttttttcatcagcattctctgagagttctcaaccttcatttttatgtcatgtttcagtctttagcagtcagctgagcctgttgactacagcatttcattctgtaccttttcattggttatttttaatttccaagaacaggttcatgttctaattgcttccctttcatttaaaattgatctgttctttttgcaatgataacttcaacatctgactatttttgctttagtaatgacagtatgggcttcccttgtggctcagctgcaatgcgggagatctgggttccatccctgggttgggaagatctcctggagaagggaaaggctacccactccagtattatagtcttagagaattccctggactgtgtagttcatggggtcacagatttggacacaactgagcgaccttcactttcaatgacaatacatgctccttattcaaacttcaagtagtaaagaaaaattagagaagatttttaaaatccacccccaaatcccatcatctaaaaatacctaggttcatttgcagagacgtggatagacctagagaccgtcaaacagagtgaagtaagtcggaaagagaaaaacagacataatatcgcttatatgtggaatctagaaaaatggttcagataaacctatttttgtaaagcagacatggatacagtccacccctcttccgcctttggtatgtatactttggtatacaccactatgtataaaatagatactcatgaaaacctactgtgtagcacagggaactcagtgctttggggtgacctaaatgggaaagaaatccaaaaaagaggatgtgtgtgtatacacacacacacacacacacacacacacacacacacgtgtgactgattcatattgctgtacagcagaaactaacacaacagtgtaaagcaactctactccaataaaaattgttaaaataaagttaaataaataaaaatagccaggctcccatgtgtgcccataaggacacctgcggaagagagtccagaaacacagtagtttcttttacctggttcagaattcctgagaagattggacaggagtcatcagagtccagaacacagagaaatgacgcgtgcctgtcgttcctatagcaggtggctatactgcttgctttcaccgcccccccccaaattgcccgtttttttgtaggtacattttttgcgtcatctgtcacctgtattgccacttgggtctacatatctgtccccactcccacgagatttttactccttgtctgtagcagagtgttgagaggttctccataaatacttggtgaattcattgctaagggcttgcaattttctcccagccttgtgagaacagcagggcaagtattttacccatgaggaaaattgagcaaagactccaagtttaactgatttgttctggtcacacagctacctgttgacagagcaggacagagtcaggcctctgttacacaccagggttatatatctaggcagctagcatccaaagactttcgaggaatggcttggagccacagcgctgagtaggctgtggaccagaatgtggtgttggattcttccccagagtcctgtgacgccctcacccgtctcagctagaccctcagcctgcatctgctccatcctctgcctactaatcctcccccaccatcaccaccgcccgagataaacataatggcgaagttaacttcctagcggggaaatgtggtttcaactctatttttcttttctgtcttagtgttctacatgcgggaaatgtttctctcagtcttccagtctaaacaaacacatgagagtccactctggagacagaccctaccactgtgtgtattgtactaaggtaaatggaccttcttttcttttgccccaccccacacagcacacagcacaccgcacacagcatgtgggatcttagttccccgaccagggatcaatatcacgtcactgcagtggaagggcagagtcttaaccactaaactgccggggaagtctcagtggaaccttcttttaaggaatctgccttgagccctgtttgggtgtccatggataagaacttatagaataaaccctggcttataatgagtccctggtaaatcaattcatcattagcccatccccaatttccaccccagattatactcatgtttgcttacaatgatcagatacaacctactattgccaaattggcactcaaggcatttgttatgaaacggaccctaaatttataagattccaatgataacagacatgaagtacagaccgccttttttttttttttcaagtacagactcttaaatttcgctagtcttggtttccagagcacttttgctgaagtagcatctaatcttgttaaacagaatactaatttataaaaatgaagagacaaatatatcatggttaggggttgctgggttaggaacaaaagttgctgggttaactttaaaaatactaaaccaaaacatctcatgtcctctttcgatgaggtacatctgggctgttcaatgtgtagttacccattagccatatgtggctatttaatttactaaaaatgaaataaaattgaaaatttagtaagtcggtggcactggccacatttcaagtgctcaacagtcccaccattgatggctggcgaccaccacattggcatggacataacatttccatcattttagaaaatcttattggatacactggaatctgctatttctatcatcaagccatttatttttttaaaatatgtagccatgaaagaaatatagtctctattagggtgactgttaaggttccaaaagaggaataaaactacctggcttagagaaacggataccaccaaagaaactgtgtcaatagaatggaaataatcagtgtagcaaattggagctaagacataactagacaatgtgcagctagcacagacctaaggagggtggctctggatttgcctggacgaggaatctatcctgagggatcactgatctcctgccagatttccagagcaggctcaaaatatcccaccgtccctcctcttcctggcgttctaattctgattctcaccttgaatttctggctaatctgggaatgagagatacccaaaggggtgactcaatgcacttgggtcataaatgagctgtttgatgttctgattttttttttttttttttgtagctagttagttagttgtttttggctctgctgggtcttcgtggctgcacaggcttttctctagttgtggcaagcagggcctactctctagctgtggttcacaggcttctccttgcagtggcttctgttgttgcagagcacaggctctagggctcataagcttccgtagttgcagcccatgggctcaataattgcaacttccaggctctagagaacaggctcaatagttgtggcacacaggcttagttattcctaggcatctgggatcttcccagacgagcgatcaaacctagtctcctgcatttggcagacagaactctaccactgagccgtagggaagccctgaggttctgacttctagttagactcctgtcacctgagctgctggagactgtcctaggcgcccacaccttgtgctccttagtgagcagtggtccaaccccacatgggcccagtcctgaaactccaaggtcactggtttaacctggtgttttgtatcactgtcagcagactcccaaattggggtcattacatctctaataaatacctgaaagtgacaaaggtcagagcagagtattgaaatgaattaggagacagggtataagtgagggaaagaaacgaaatggccatgtaaaaacagcaaagcacttgtaaacctaaaatagtagaactactctggaaaactgtttggcagtttaagaactaaacttgtaacaaccattcaacccagcaattgctctcctgggcatttatcccagagcagtgaaagtttgtgttcatgctaaaacctgtacacaaatattaatagcagctcatagaaacctcaaactggaaataactcagataccgtaccatgggtaggtgattaaacagactggaacatccacaccatggaattcttctcagctatcaaaatgggtgagctgggacttctctggtgttccagtggtaaagaatccacctgccagtgtaggagacacgggaacgatccctgatccaggaagatcccatatgttgcggagcaactaagcctgtgttcccgaaatactgagcctgtgctatatagctgagaagccgcacctagtgagctacgtgcctcaattacaaaacccatgcacctaaagcctgtgcttcgcaacaagactgcagtggaaagcccgaccactgcgactagggagtagcccccctgctccacaactacagaaaagggcctcgcagcaacaaagacccaacacagccacaaataaactaaatgcttttttttaaataaaggatgagctgttgtacctgaaagaacttgtgtgaatctgcaaaaaaaattctgcggagaaccgctgatccccaaaggttacatattgtatgcttccatgtacataacattctcaaaataataaaattacagaaatggagaagagattaatggttgcaatggcttaaaagtaggtgtgagggggaactatgtgtgcctgtcacagggtgacatgagggtccttgtgatggaaatgttctgttcagttcagtccggttgctcattcacatctgaccctttgcaacctcatggactgcagcatgccatgtttccctgtccatcaccaactcctgcagcttactcaaactcatgtccattgactcagtgatgccatccaactatctcatcctcagttgtccccttctcctcccaccttcaatctttcccagcatcagggtctttgccaatgagtcactgcttcacatcaggtggccaaagtattggagtttccgcttcagcatcagtccttccaatgaatattcaggaatgatttcctttaggatggaatggctggatctccttgcagtccaagggactctcaagagtcttctccaacaccacagttcaaaagcatcaattcttcggtgctcagctttctttatagtatagtccaactctcacatccgtacatgactactggaaaaaccacagctttgactagatggacctttgttggcaaagtaatgtctctgctttttaatactctgtctaggttggtcacaactttttttccaaggagtatgcatcttttaatttcatggctgcaatcaccatctgcagtgattttggaacccccccaaaataaagtctctcactgtttccattgtttccccatctatttgccataaagtgatgggactggatgccatgatcttagttttttgaatgttaagttttaagccagctttttcactctcctctttcactctgatcaagaggctctttagttcctctttactttctgccataagggtggcatcatcgtgtatctgaggttattgatattttctcctggcaatcttgattccagcttgtgcttcattgagcccagcatttcacatgatgtactatgcatagaagttgaataagcagggtgacaatatacagccttaatgtactcctttcccaatttggaaccagtctgttgttccttgtctggttctaacttgcttcttgacttgcatacaaatttctcaggaggaaggtcaggtggtctggtattcccatctcttgaagcattttccacagttttttgtgatctacactgtcaaagacttgaatgtaatcagtaaagcagaagtagatgtttttctggaattctcttgcttttttgatgatccagcggatgttggcaatttgatctctggttcctctgcctttcctaaatccagcttgaacatctggaagttctgggttcacgtacttttgaagcctggcttggagaactttgagcattactttgctagtgtgtgagatgagtgcaattgtgtggtagtttgagcattctttggcatgcctttcttcgggattggaatgaaaactgaccttttccagtcttgtggccactgctgagttttccaaatttgctggtgtattgagtgcagcactttcacagcattatcttttaggatttgaaataactcaactggaattctatcagctccactagctttgttcgtagtgatgctttctaaggcccacttgactttgcatcccaagatgtctagctctaggtgagtgatcacaccatagtggttatctgggtcatgaagatcttttttgtttagttcttctgtgtattcttgcctcctcttgttaatatcttctgcttctgctaggtccataccatttctgtcctttattgtgcccatcttagcatgaaatgttcccttggtatctctaattttcttgactttcaatgtcaacatcctgattgtgatattaccctatagttgtaagatgcaaccattgggaaaactgggtaaagggtacccagaatctctgttgtttcttctaactgcatgtgaatcactattactctaaaagtttaactaaaaaaaaaaaagaaagaaaccaataaggtacccatgtatgcaaagatagtggccaatgttagcaattccttccataatgcagatcatcctggagtgtgatctcagtaccatctgcttaaatgcagctgccttcttacccaaaagagcgtactcatcaggtcaacctgcatttttgactagacacccagacgatcttagccattgaagggccactgttgtaaccagtggcatgtccatcatgtccttttttattaaggctattcctggtgaccaagagtgccctatagcattaaaatccaggatttgttgactgcagagaactaaagtgtgatatcaggatcaatgagggcttctgaggtggctccggggtaaaggatccacctgccagtgtaggaaatgtggattcaatccctgggtcatgaagatcccctggaagaggaaatgacaaccattctagtattcttgcctggagaatcccagggacagtggagcctggtgggccacagtccatggggttgcaaaagagtcagacacgatttttcaagaaaacaacaccaaggatcggtcataatgaaattaactcctttgtttcattggtggatggcattttattttttcctgtgctttccgtcctctgcagaaattcactgcctccagtatactccgcacgcatatcaggcagcactcgggggagaagcccttcaaatgcaagtactgtggtaaatcttttgcatcgcacgctgctcacgacagccatgtccggcgctcgcacagggaggatgacggctctccctgtaacacctgtgggaagaccttctcagatcaagaagccttccactcccacatgaagtctcatgaagactgctag

SEQ ID NO: 6 - protein, 571 aa, Bos taurus
MALRPPGEAGPQDKGCYPPDWLQGSPQHLAAYYTPFPPYGHYGNTLTAAEEGFQPFRPLEALAASPALPPFGFRTAPPLLSQGLALPREPLCDLPWYSKLPTWYPVPHLPREVPHFQNSSREFTGAASEDLAHTAGRSDGGQCWGPEIFVPPPPVDASLLPERPKPSQLLSGSPSEPSEDGPKLVNRKGKASRRYHFTQEDLHLVLYGVIPSPQHSARLQHAISGLLIPTDSAGADSLPQTLDNDSLQLPEGLCLQQTKFGEVAHFGVFCSSLVAKGVRFGPFQGKVVNTSEVKTHGDNSLMWEIFEDGQLSHFIDGKGGAGNWMSYVNCARFPSEQNLVAVQCQGQIFYESCKEIYQNQELLVWYGDCYEKFLDIPVSLQVLKQGKQASGSSEESAEGYRCERCGKVFTYKYYRDKHLKYTPCVDKGDRKFPCSLCKRSFEKRDRLRIHILHVHEKHRPHKCSTCGKCFSQSSSLNKHMRVHSGDRPYHCVYCTKKFTASSILRTHIRQHSGEKPFKCKYCGKSFASHAAHDSHVRRSHREDDGSPCNTCGKTFSDQEAFHSHMKSHEDC

SEQ ID NO: 7 - DNA, 32285 bp, Mus musculus
gccttgacgtttctcccgagaaagcttagtttgcattcaccgaagttgcttgttttgggagtttgttgaggcacagaaaacgtgccacagggaagactgaaggttctgcagccggaggtcgtcgggagctgcccgggctgctcaggtgtgccgcttaggactgcgaagagccgtggaacagtgcaaggtctttaaaacgttactcttgctaccttaagaaatggggtttcaaagaatggagccggggtggtgtttaaattaggatatcagtgtggggaaagatttccagtgttggggacagtaaaccagaggggacctcctgttgcttcattcctccgacggcattcattatttaaaaatttaaaacgggatggaagggaagaccttagatctttcccttcagtctgtggatggaagggaagaccttagatctttcccttcagtctgttcaaagaaaacgtcgaatttcgtgtcacccgttggttgattaaacgcagaatcggatacaccttattttgaaatgtaaacttaatataatgtcggaaattctaaaaggcctgccccaactgaacaggggcaattacgtttactcttcttcggtagcgcaaaaacagcacccaaagttttagatgctgggagagggacatgggagacagagagcagagcgactctggggatggggatcaggggtgtcacacgtcccagatgccaccattaggacacggagactcggtgggaggctagggagacaaggtaagacccagaggagggagagtccagactggttcaaattgaaaaaggaattcgcagctagcggcttgcaattagactacgcagtgcacgattgcgcaaattattttaaaggcgggagggggggcggtgaggcgggggaggggtggacagctgttctgcaggaacactggtgctgccagaccctcgagtaggtgagagggagcagacacaccctttgtgcgtcttctttgaactggagccctttctttaaagtcaccaaagaaggagtgagtgggtttaggatgacccagagattgctttcgttcggagataaagagaaccaagggtgctgacagagaccctaaggataccagagggatctttctgtgtcgcgtccctccaggctcagggaggaatgggttgtgcagacaaactttccgagaactcctggcctggcccggagttcccgctgtcactggctagggtgctgcctgccacttcctaagtgcagagcagattctgccgcgtggatggctgctgggcttgcaatctagtgtaattggtgagcaagccaggcagtctaaaccagagtcggggctactcgagctttccagccttcgcaccttcgctaaccgctagcaccgcaatcgcgctgaacttaggggcgcagagctggaggggtggcccggagggcagcgcctggagctgccaagctaccttttccgatttttgaaatccggagagatgagtcctactcaggatgacacttttaagttcctggttacgtctcaccttactcgcacctttttaggttctcggttcctggcaagcatagaggttaggcacaggcagaggagggcttgggcaggtgccagctctgagtacctacccagcgtggtcacgttcactatgggatcaatgaaccatgcgctgcctctttcacaagcagcctgggcgttttctgcgaggatttacttttttttttttttcctttctttttaaaaggaaccttcaaggattactatttaaagttttaaatgttttgattcaacagacacttgtaaacagaacaaaagggaaaggcctgacttgaaactgctttgctttgaaactattctgctttgctgaataaaacagcagaggaggaataattgagggggaaaaaaaaaacattggttaagtgagtattcagctgtaaataaagtaacaggaaagacccagtaaataggaaaaataataaaataaacagtagatacacgacacagaccgttgggaagctctgttcccactgaaagcctctttctcccagggaggatatttgtgggggaaaattatttggttattttcacagtattacagctccctttgaattaaacttttttttttttcatcaactagacttagttctttaattaggaagcacaattgagtttctaacagatgttgtcagccgcaaactctgatccaaaataatagtgtaattagtttgggggggggggacatctttagtttataaggcctgaaattaaaatatgatgtttttaaacattgtggtacaaagccaccgggaacatttgttccagagtctagtagtggcaccacttcctggttctgccttggaaaagtttgcagtaggatgcttagggcccttcttattctagacctctctacatttccttcagctcttgggaaattcaattttaaaaaatgtttctgactgaaaaaaagtgaaatccctaaaacacagcatgttcccagttggttaagtttggttttttagttgttttttgtttgtttgttttatcataaactgactgtcctagagatggctaagcagggttttttgtttttgtttttggctaactatagtttttttttaaatatacataatgtgaattaatgttagcaaactttttgtaccttgaaatataaacataaatacagatttttctctaatagctgtctgaaaaatgaaatgtttgctagcttttctctgtggtaaaactagcaatctggcctatctgatttgaatataagtatacgacatcaggataaactaaacaggacattctcctgcatctagtttttgctcttacagcttgatgttcttctagactctatgctgcacggtacagatttgtctttataaattatccatttcgtacacattacaaggtgcaggaagtcaagctattctctacagtacttagcaaatccactggcgaaaattcttatggcttaaacggtgtttttaatacatgccatgtttcaaaaagcatttagcaaaaatcagtttctgtgtaaaaatagcctatcacccttttgtggatctcagtgcctgttttcaatgtttttaaatgttaaaggccaagaggacattcattacattgtgctgtctgtgtcttcttcagaacccctctccattggagccttttgggtcctccttattttctagtaacaatgcctcttagggacaggtagagttaaaattacccactttggcagacagaaactagaatcctttgtttctgacacaaagtaaacattattttaaccaaataggctatctcctgccttagagtcacacactaggttttgatttgtcttctttgggttacaagaaaacaaacttctgctccaaacatagctgcttgttttcagactgagatttctttaactctatgagaatactgttcactgacagctgatagaggtctgagccttagaatcttcctaagtgggaaatctaatataaatgacacagggagcaaagacaaggaacttagcactcaaaaaataagtcccattgataaatgtaaaggtcattgataaatgaaagccgttcacaaacaagttccttcatgcagaatgaatgctagaccagggttaaatgtgtcctaagttatttctgtttgtttcctcttcagtcttattataccaatgtaatttgatgtaggtttaattgataaaatgatttcggtcagttataaacaaatgttattggtctgtctcctggcactttggtgttgatctatatataggaatagctccgggtagctccccttgaaggttgcaggtgatgatgttaaagttctctgggttctgctgccagtgactcctcagcccttctaacacggaagtagatcagagaggttgccctcaaaaagttcctagcccatgcattttgcatttttgaaaggaaaatttttggattgtttcctgatttgttgggaatgataaagtcatcgggggcatcacaacttcctagcattgattgggaatataggtttctgggttttagaataagtatttagatgaaagtttctgagtacatattttttaaaagaattatacagcctcgatttcagtaaagctttttttgctctacactaaaatcttaaatgtattaagattcatgaccttcaaaatatagttgaatttgaaggagattttttttctcccccaaatttagccacacttccttgtagcctttacaaagttctacacacagcattgcagtgggaagttgtttctagcagctgtctctcagcagttgcctgagctgagtgtgtgtggggtttttcctaatgaaattttaaatgtggctctgtggctcctaacacaccatgtggataatatgtgaacaaaagcatgtgtgctgaacattattactgtaaaagaaaaatagtttgcttcttttaaatggaaggatactttaagctttagtaatgatgggggtcactgcttgaaaagaaaatgcctaattagcatctgacagcaaatcgtcaatctgtaactaattcagttattaagatgatattgtgtgctggaacaaaactttccaagtaaactggttgttaagagtctagaaacttcctattagaaaatcatatgtttaggtagtttctctttttacattaatttgtgtaatggcaaattataagtagcttgaatcaatgaattctaagtatctttattactaatttgattcttttctggtggaggtttccaacaactttgttcttacagatgaactcagctgcttctcagtgtttcctgctatgtctgagtatgttattcagaattcatcaaagtggcctgtgtggctaaatgttagccttttctttctgttgttagctagaaagacactttaaatatgacacacacatcaaaaacaaagggctttgaaaagctactctacttttaacgataagtattttctgtacttgacagaaattgatctaaaacctgaaaagctttagtaatagaaaaatccagatctacataaaccactaagtcggatgaacttttcctaccgacatctgactcggggaaaaatgtactttgagaagatttgtgggactgggaatatggctcagtgctaaagcacttgcctaacgcgtgcaaggccctgcgtccaatcctcagcacaagtgggagggaaggagagaggaaaaaatggaaggaaaagaaggggagagggaggagaaaataaagggagttgggggggagaaaaatgagagctataaaacctatctgtaattctggcacttgaggggtagaagcaggaggattgcatcaagttactatggctacacagtaagttccagacaagcctatgccaaagagtgatctctcccaggattagcagtctcagtttgttcctgcatcagacctagtttaaaatcataacatcaatttcccattttcctatgtttgtttccttctcttacatatgttctcaggctaaagacagtcagtcagctttcattacaaagtaacttgggttggcagttgtcagagcacctgtctactatgtcccaggccgagggttttaacctcaagtatttatcctcacctcataacaagataataacgtttctcatttatgatcctgcttctgctaggctggtagcatccatctttctttctgtggtcattataatcaacctggctaagattctctcttatcttttctataattgtatatttcccattcaaatttggcagttacattataatgaattttaacgaaaatttttatccaaaagtgatgtataattctgtttacttgaattaagctggagcaagacatcagtctctggttattgaattttggaacatcccataagtatttcgcctctgcacagagagaactgaggccccaggtacacagcggacgctatgctctatcaaaagccctcttctcatccctcactcaccagtctttgcccacagctttgctggccacacgcaatacagagtgctcctgctgttcagagtagacatggcttgaatgtcattgacacggtgggctcaggtgtactgaagcaggattctctgccctcggtggtttggtactggttcacagccccaaaggcagtcaaaacagaccaagtcttcatgtttaccaacaagtttatgcaacctttgttgatctcttactccagcggctaagcatcaaacagagagtataaagttatacacatttgaaaaaacaaccaactaaaattcaacagtctccaaacattttagcttctatcatcttttttcaagaattacttttaattacttgcaaatatgtgtgccttcatgagtttatatacaccacatacatgcagccaggagggtactggatcccctggacctagagttataggctgttgtgagcggcctgttctaggctctgggaactgaacccatggcctctgaaagaacagtaagcattcttcatcactgagccatttctccagccatatatatcttttaaaattatgttaaaatatatggctttttaaaccagtatattttaacaatgtcaagaggcttacagaatactaccaatgcttatgtcagtacatcttcctctgatggcctactttccaagacacatcaaaaccattttgcccatatatatctgtgtgtgtgtgtatatatatgtgtgtgtatgtacatatatatgcatatatgtatatgtaaatagtaaatatctcatatataatatagttatatatcttaacatttgatgtgtgtctgtgtgtgttaaaatttcctgtgtactcttcccatcttctcccttattctcaccagttatttctttttcttttttttttttttttttttttctggtttttgagacagggtttctctgtgtagccctggctgtcctagaactcactttgtagaccaggctggccttgaactcagaaatctgcctgcctctgcctcccaatcgccagttattctatgcttgattttagactttgtatttggatgttttcatagtacagttggattagaaaacaggacaaatacaatcagggtgtatgtatgtttgttgtttttgtttgtttgttgttgtttggtggtggtagtgtgtgtgtgtgtgtgtgtgtgtgtgtgtgtgtgtgtgtgtgtgtttcttctggagacaggctctcattatgtaacttagcttgcctagaactcactatgtagctcagactggctttgaactcacaaagatctgcccacttctgcttacctgacttacctatttctaactaaacaggattttttttttggcctgtctattctgatgaggtcaattttactaatgatattgtagtgttcaactactggagatctcattactttatctttatggtaatgtttgctgtgcaaaggtggctcttgtgaccttctcagatgggtcatcttacacatagcaataattgtctctttaagatataccccacagaaatgggattgtgagggtatagaataaagctgttcacctgtcagtcttacatgtcagtccttgtgtctgtcctttttctttcctccatctgcattactgcagcagagtaaactgctttgtctttaacatctggtggactgagtcccctgctgtgttaaaacatcatctctctttgcttgtgaagtattggagacaaaacccagagcttgcactctatggagaatattctgcttttgattctcccttgtagcttacagccagtgtacgtcctttttccatactgaagaaaacatccttcaaccttttggactcagatagccacaaatagctctcctcaggtgaaagcatttaatatgctctctatgtgattttttttttttggatcatcattgaaattaaaacacattatataatgaatggataataaacaccaacttccagtctactgtttcttttgactgtcttggtcctgaactttggtacagaaacaaagtcagaaagttcgtttaatttaaaaaaataaacaaacgaacatccaaaagtttgactaagcagaagagtattagattgctaaaattaaggcgttttgttttgtattgttttgctttcttaaggagcatttgaattgcggtgtggaggcaagagcaggtaatggctttctcttccccctttgtccttaagaggggcagaacaatgggtgttacttgagaacaccttctaatctttgtcactctggaacatgcctgcaggtcatcacaaggttctcagtggtgtctcgattttttttaatttaatgtttaacttctgagagaattgcttagaaacatttacccggccttgctggtgactcagggaaatagttagataagggtgaccactggtcaagataagatacttcataacaagcttattttggacaaatgattaaaagtagaattgtcatggctttgctaaactggaaatttagtttgatttttttttattcttaagacatatagcatgagaaataagccttaatatcaaaatttaagatatctagagcattgatcttttttgaaatatattttgctttacacaaatttagaaaaatctttggatcgtctttatcaagtatatcaagtgtgaattttcatcataatacatttgttgagtttttttttttttcttcttattcttccttattgctgttgcccttggtggggtggggagatgatacttaaagcagacagtttgttcccctctgtcagatcatatgcactggtctgagaggcacctgtgccatctgtaatcagcggcccatggtcctaatttcatcttccttttctgttcaaggctttacttggctgggttctttagtagcgtgtgatcaaggtaacgaggagaaagcaacattcagcaagattctgcgttatttcggagtgatggtattagtttagggctatttttttcttctttcatgtttaaattaattcatacattccaagagcataaaaaccaagatacctatagatagataccttatactttggataatgcttcatgtattcattcactgtggtggctatttctggttgttaatttgactatatctggaatgaactacgatctagaattggagagcacacctgtgatccagatcttgaggctggaagacacaagtttctgacctggatcttgacgtggagatcttgaggcatagtggctatgaaaagcttaggcccaggcaaggtagtatgtgcctttaatcccagatctctgagttcaaagtcaacctgggccaaagcaagtcccagatccaggcatggtggtacataacttcatctgagtcatgccttctgctggaggcttacatagggaaattggaaaatgaaagcctctatcttttttgactgcttacactgcagcacgtgtgttggaaactatttctacagaagaccagcttaaataactggccttataggactgagcaactacttagattcttggacttcccacccacagctgcccattgttggattagttggactaaatcatcacaataaattcccttcacacagagagacattccataagttctgtgactctcgagaaccctgactaatacattcacccactgtgtgtagatgtgcatcctgtgactaaagcgatcatggaactcattggctaccacgggacactttgagagtgaaaagggacattaggaataattagtcatgataataagcacaagccaagaggcttcctggcaagtcagaaggctcgaacgtctatgcgtcatgattcctacagccaagaagttttaaaaataacttacttagctctcaggatgagaaaggaagggagagttgattggaagggagggaggcttctgcgtaggcactgtacctattaataacacacactaacacacacacacacacacacacacacacacacacacacacacacacacaccagaagactgcctggctggaggaaggttattaagagagctgtgtgtattagttgccttgaatgtgcgtgcccagtggttgtgagaattgtgtctttattaactcctcgttatccttggcatttaaaaaacattacccggaattcttttctctaagactcataatatatgtctgtccttagtctttcttccattttttttaaattttgttttatagttctgtactcatctaggtaaactaattcacttttgggtggggggctactagaggagaaggcctcctagtaggccttatgttagccttcttgctcaatcaagacaccggtcttagttataaagggtctgaggggccatgtagaatatactagctccctacaccacataagccaggcatggtggcactgtgatcccagcagtaccaggggaggggaggagggaaacaggaggctcaaagtatctatccttggctacatagcaagttctaggccagcctgatctacacgaaaccctagctcaaaaagtaaaggatgtgtgagaggtgggaagccttccaggccagcctagagcgtgctcatttttggacataagtgcatgtgattctcaaaacagagcagctttgcatgcctccattgctgtatttatccctcctgagggagagcaagtgagtcaggatagaggtgactgctggcaaaggggttgcctctctttcagttaatataaaaaggcattttggggggaggggggttgtgcatcatgcccctcctcctgcttctgaaatcatatactggggaatacaaaatataggagtgtgtttgctgatcaacagatcaaaggttcccatgggggttaaaccacctggaaggagaaaggagctctggtctttttctgcagcctgaactctctaccctccattttagccagattttaagtaagcaacagagagagagagagctgcagctgggcactctgccttcccagctctgggctgcatgggatgtgtgagtctgtgtatgggcccagtaaatctgagctagtggagactgaagaaaaagcagtaacatatattcacacaaacaccaaaactcattgttgaccagttcataagtcactcttggtttaggatgctcttgctaggcaaggatgaatggaaatgctaactcatactgtttaaaagatatttgtggcaccaaagacaagcatatccccagtaactttctgaggatttgcaaatatttgcaggctaaaaaaaataaatatagtcggaaaaaagaaccaagtgatgtcttagcagcgaattctctggtcttcctataatttagaagataacatatcaataacgataagaatggggggctggctgtgggacagacaatattcacaaaaataattgttttctttggggagttattaatattactgctttccattatcagaaagaaacctgggtggtttggggggataccagcaatgctaaccatgtgacccagtcatttaatgttggcattccaataacccaggctggcctagaactcatagcgaccatcctgcctcagcctctcatggtaatattaaacctgtgagccaatacatgaatgtattaaaacatttccaagtgtcatcaacaggtgctctcaagggccagagagcctgcttaagtagcaagggtacttaccgtcaagttgatgacttgagtttaattctggagacccacacagtgaaaggagagaaccactccccgagctgctggctaacctccaccaatgtaccatggctcatgcatgtgcacatgcgcacgtgcgtaaaaaacacaaacactataaatattttaagaggtatatccacttatgtttcatacattttgccattgtagttaagaaatgttgggctggagaggtggctcagtggttaagagcactgactgctgctcttccagaggtcctgagttcaaatcccagcaaccacatggtgcctcacaaccatctgtaatggggtctgatgtcctcttctggtgtgtctaaagagagcaatggtgaatacatagaaataaaaaataataataataataaatactgacagcataaacccaacatgcttgtaatccagcagtgggaaggctgagaagggctggcacaagtttgaagccagcctgggctttgtatagcaaaaccttgtttcaaacaacaacagcagcaaaacaaacaaacaaaaaaatgttctttatcttttcttagaatgcatgtttaactaaaaatatatatccttctatgtggtttatccaactagctatccaaatgatgtatctgtgaagaacggggaacaagttccccccaaatcagtatgtttatggaagcaaacctgtcggattccttctgatacatgggtctagtggtgcagtcccgttccacctttaagtctttcacctttgctgcctaggactgtgagtgctggctggaattttcctaaggcaaaaagaaggacatattcagaaagtctttgacaacatttaaacaactcttatcaaaacttaatttccatgaatgattgatttggcggctggaggatgctcaattacctctttttcatgtgctaatgaagccgagggtgactttagggaatttggtgaagtgaggcagcctgtttggatatgcacaggacttctttgctttctatcccagtgttcatagctgctttgttattgtcttgccaagcaactgtggttaatctgtctgccaggccacaggccttggccttcctcagtaggaagggctggaattagtgaagctgtcaagccaggtgttgagtttcaagagaatttattttgtacaaatcttccaataagttgcaaaatcaacaaaattcaggtttcactccacccccacccctaggtgcttcttggcaattcatttttgagtgaaatcatttatactgggaaagaaaactttcaatttcaaattttgaggatttgggtgtggtggtgcatgcctttgatgccagcactcaggaggcagaggcaggtggatttctgagttcgaggccagcctggtctacaaaaaaaaaaaaaaaaaaaaaaaaaaaaagtcccttttattgaaaaattaaaaatagaatatttccccctcacaaaatatatccttactacagtttgggctccctctggtcctcccaggcccttccagcctccctctcacctggatctactcccactgtgtctcccattaggaaacaaacaggcttttaaggaataataataaagtaaaacatagtaagagaaaacaaaagctaacatattagaataggacaaaacaagccaacagaaggaaaagagcccaagaagaggcatgagaaatctacagacacagacccactcattatgtcgctcagaaattccataaaacataagatacccaaagaacaaaaatacccactaacctggaaataaagccaaagacctgtggaggaggggcagaggcagagacagagacagagaaaatatatagtatacaaaaattaagttaaaaataagataaaattttaaaacacacacacacacaaatacacacacaccaaggaagatgcctgacagaaccttccaaatacctattgagttccatttctgttggcgtctactgctgggcatgcagcctacccataagagtagtttgtgtccccagtgagactccctcagaggaaactaaattttcatctgtggttggtaatctattgaaggtagcttctagggtatggacaggtgtatgtgtctacttctctcagctcgagaaccccacctggtgcagacccatacaggttccgtgtttgcccctcaagtctctgagttcatatgtgcatcaattctgctggtttatagtcgtgtcttcctggtgccctccatcccctctggctcttacactctttctgtctctcttcctctatgttccctgagctatggtgggggaggaatttgatggagacatcccatttggggaagagtgtttcaaggtctcttattctctgcatgatgtctggatgtgggtctctgtatttgttcccatctgctgcaagaggaagcatctctgatgatggctgagcaagcacactgatctgtgccccccacccccaactctcctgccaccctagtcaggaccagagtgccaggctttgaattttaaaagttgacctccagatccaagttttcacactgcactagggttttcttcaaccaagcttgtctggaaatataagtagggtgctaaagaatccctagttccatttttgagtagccagagaagaaaagaaagattgctttgatttttgtcagggaagaaaggtcctgtagaaaaattagttgaaagattctttccaagaacgtagttgctatttggacttaagtcttgatgatatgctaagtgttcttgcagagactgaacacgaacctgaaagcttctgagggtggacagttacagactggttttgtgacaccccctccttccaaagtaagacacttccagcctttcctgttcaaagcaacaatcccagcagaaccaattggttcctattccttgcttccgacaaaggctgttgaggcctgccagcttagaaagtgatgtgcatccagtagaataggtctttgcttccattgaggcaaatacgcagcctgcaaacactaactgagttgttctagcagacacagccaaaacatctgggcagctttgtcttgcttcccctgtagccatggtaggactagctctttagagcttcagttttggaggtacggggcaggttgtcatggtgagaatctgcaagtcctttcatgagaatgtcataaacttaccccttgaggggtggccttggagtgctgatcaaccttaggattctcttagaacataatttgctccaggtctcattctataattccacttgtatttataaagtatcttctctcgtcttccagcctcctcttcccacaacaaaaaataaacaaggcagtcagccctttgccagatagcatccaagtagccactgtgtctgactgatgcacatttcagaaacaggtcatccgttgcagttgtcggagatgaaggctggccctccacgttgctccaggacacacgtcaatcaggtgttccgcaatggtgggaaggaaggaatcttcttagtggcttctcctctttgacagcagagtattgtcctggagggccctggccccgagtgtcacacagcacgcttactatatctacagtttctctaatgtcaggttcatggcaacttgaacattcctttcccagatgatagaaagcactttggattctagttagtgtgtattgtgcaagatgtccccattgttcctttggggattagtcatggtgaaaagtgacttttctccattatttgcttactattctgcacgtattaagagctagcatatcaaaacttctctggaaaaaaaagagcaagtgttgttttgttatactatctgagcagactgttcatgtaaaactacttactgtgctatcctctagattacgtcaggggtggattgttttttaaaacattttattaatcgtgtgtgtgtgtgtgtgtgtgtgtgtgtgtgtgtgtgtgtgtgcgtgcgcgcgcgcgcgcgcgctcttgaatgcgtgctctcatgcgtatactgaggcaagtgtgtgcatgagtaccacaggcgtgccctcagaaaccagaagagagcatcagattccctggaactggaatcacagacagttggagctgcttgatatgggttctgggaactgaaccctcgttccctggaagagcagacgtgttcttaaaccactcagtcatcgctccaaatcctaagccagtaacttttaaaactcatgttttggttctttaactgtttttatatcttaagatttttaagcaggagacaatatgctccccacactatccagccttctgctcctccctccctattcttaccccgcacttgaaggctagcaatccaggccacctgtctgcccaattcctttccttttcgatggtctgtctatatattttcctaaactcaactcctaaggattttctccagcaccagcctttccctgggccaatcctctctcccgagcatcatcggctcaagttccctaaccattagggcatcctatgaggacgcaatctaagcttgcctcccacccaccacactctggtgtagtgcagtgactatccattctgatgaaatctctttgactctccagaccctctaaggcagtgtttctcaacctgtggctcacaaccctcttggggtcaaatgatcctttcacaaagatcacctaaaaccatcctgcaatcagattatgattacattacgattcataactctaccaaaattacagttatgaagcagcaaggaaaataattttatggtcaccacaatgtgaggaactgtattaaagggtcacagcattaggaaggttgagaatcagtgctctaaagtttgcttcatttacttacagaccagacagcaagcgccttaatcctccatccctttgcaatccctttaggaaatcatttgatatctctcccctccagagtctgtccatgtgcgctctctggctcactctccctttgcaattagttttccttttacagcattaatgagagcattggccatgtgttaatggatgttgaagatcctgcaagccttcttcttctgggatctctctctctctctctctctctctctctctctctctctctctctcacacacacacacacatacacacacacacacacacacacacacacacaatcgggaaaaggaaggtaggtctagtcagatgacatctttgtgtaaaagcagtatgggagtgtttggtagtacccttacctgaaataaaggcagagatcacatctgtagtcaccccagttcctacagggtttatcctgaggtattaagaaaactgattattggcagttgcttggtttctcttgattgtcttcgggtacatggaatcccttccgctttaactctatgtaggtgagtttcaccttctccatacagctgtgaccaggtctgtggctggacatcacatttctctgctgaagaccaggggctgagcacagttcccccagttgggctggttggtgttctaccaggagtcctgtcttccctttggtctcagcccctgctcctgtcttggtcactcatctcccctcaacactcatgaaggctgtgagcatttggttttgctttcattgtaaagtaaattaactttgacatgagatatttgaagcaggggaattgggcaaattccgaatgactaaaagacatgcaaagcatatatgtaacaatctgacttcaaaacattcctcaggtgcttcaaagtgggtttgctcaactctcagcttccagggaggcaaacactggtgcggatttctaagggccacttcctcttctgttggaagggaagtatcactgtagactggggaaaaactgaggaaggtataattttactggagtcattagcgctctttgggcagatctgtgcttgtgttttaattttttgaaagaattctgctcacttcaaaatcctcacatattcaaagcagtaatgtaagagacgaccaaggaacacatcgtcatgtacacatatggaagagcaagttatatcaaaagagagagcacaggggaatgacactggagtctagtttaaagagaaagggagatagccagatctgagttacctccagagtgggagacgcggagcatcagagttgaggcacagaagaacatgtgagttgaggcactgtgatgatatttccccttcttaattttaaggtcactgctgggacaggttagagtcagcagaggtctgctgggccactctaggagctatgtggtcccaagttatggtcaatccccggctctggtgcatggtaaggcgagtttagcccactataacctagcttagccggacttgttaagcctcagggcttgggaccccagagaatctggctgagcactcttctgcaggtgccttggggtttgctatattttttttaacctttggggacagaattcaccccctcctctattttaaataaatgctaagaacctcggatttaaaaaatatgtgttatacagtggaattttaggcagccgtggagaaaaatgaaatcgtgacatttgtgggaaaatgggatgcggctagaaataagtatgttaagcaaaataagccagactcacaaagacagctactgcatgctttctgtcctatgcagaacctagatttaaaactgtgtgtgtttatgtgtgtgtttgtggctcattgaaccagaacattgatcatgaaagagaaggaggagctagatagatcttagggatgagacaactaaggtagtagaatacaaggaattggaaaatggagaaaggactaggtgggcagaggggcgcaacaccagcaggacagaaggagggacacagaggaggagaatagcagaggggaagggtgaaggagagcaaagtacaatgtcacatgtatataataaagccaagatggaacccattgtttttcatgctaacctaaaaaaaattttatgttacagcttaatactataaataatacacatagtcacacatttaaattctttgtatatgttttcattcaaaacatttattattgaggtaaattaattaaatgctaattgaaacccacctgtgaagtatatgattcatgatgctgggcatggtgagaaatcctgaggcagggggatcacacattcattcaaggcctacttgagcttcacaggatgttaaggtaacttagcaagatctcagaataattaaaaggctctgaatacagctctgtggatgatcaaggctcactcagcctgtagtacttaaataaataaataaataaataaataaataaataaataaattttaaaaaatctgtgggtatacatagtcacagccttacttcagccatggtgcttgaagcttaatctctatagcttggtctcttcatctaatagcttgtcacatgaaattattggctggtttgattcagttcttgagatggaggtggacagatgcctcgtgttggggtaggaggacaagagctgctgtcacagctcaaatgagtgacttgcatcaaatgctgttctgcttattattccatctgctggtgtcttagttagggttttactgctgtgaacagacaccatgaccaaggcaactcttataaggacagcatttaactggtctggcttacaggttcagaggttcagtccagtattatcatcaaggcaggaacatggcagcatccaggcaggcatggtgcaggaggagctgagagttctacatctttatctgaaggccacaaagagaagactggctttcagggagctagcactaaggtgttaaagcccacgctcacagtgacacacctactccaacaaggccagacctcctaatagtgccattccctggcccaagcttatacaaacaattacagatggcgttgccaaaggactggccctcttcagcaaccaatttaaatgaaatccatatctttgtggctcaggtcccctgttctcaaccagcgccctgcccccacgttctcacacaaataatctcacacagacacacagtcttcccatgcccctgcatacacctcagcacacaacccactgtgtgcacacacaataccagccacacaaccacatgctttgcgcatgccctacatgttcatgtacaagggacattcgtgtaaactcatgactgtttctcaagtggcttacaagtcgcccctcagccagcacgtgccccacatgtattcaggggaagggttttctaaagcaatctcaggcagttttgaagtactaacccttaacattttgtcccggaaacaagattactggttcctctgtgtgtttaaaaatgcaagttaaaaaatagaatttgatttctttctgattcttggcttgttacctacaaaaagacagatgtataacatttcccaggtccttgtttttctcttaccagttgaccagttgaccaggatagttgaaccccctgggcccgcctcgaacatgatcccagaacctgcccagactgagctcatttttgccttgtgtataaattgccttttgaccctggagtttcttgtctcgttccttaaacaccatttttggcaagagtcagcttttaagactcacaaggtcagggctaccatgtctgagggccctcctatgtcgttaggcagtcattcccactctctcctctgttcccactctcttcttgcccatgctgtcttctgctgcttcctgcccaggcaggctgctgctgctgcctgcagttttctgtcctcaatttgcccccatccttcactggggttgaacatctcctcacagaagtgtttcctggtgcttttatcaaaagggcttcctcccgcccatcttcttatctggatttagtcaactattttgtcgtctttgccactttccaaatgcatttatcagtttgtttacttccctattgtctgactcttcaaccagaatgctaactctcccaggcaaggaatcagtttgtctgtctcctttgtctggagaacttaacttgatggcacataacagttgctttttgtttgttttgttttgtttttaatgaatttaaaaacccactaaatgactttgaatacaaacgtcaatatgtttaaggatttttggaaaaaaatctggacccatgcacagtggtgcatacccttaataccagcaaagacaggagggtctctgagttcaaggccagcatgatctctagaaagtcaggggtgcacagagaaaccctgtcttgaaaaaccaaaaggaaaagaaaaggaaaggaaagaaaaagattatgggatccggtgttttttactaaatagtatctacctcttagcttataagtctaaaatgtaacctataatactagttcattatagactattatatataaggttatagattagatatttaaatgtacatcctttctataatcagattacaaaattgtggatttggccttaaaaaatagaaagtgtttgagggttttgttgttttatagtattttaaaagacagcagttggctttcgggtgacaggtgtcctctttttaaattgccaaagctgtgaatgattgtgaccaaaatagttcagggagctgatggggctgatgggctagcccagccgctgagatctgcttatttcttttgtgagtgggtgctggaaagaggagccatgcagactgcttgatatcatataggtaaagggttctcaaagttcaagatacagggtcttgcagggtgccaagtggatttccttggatttaaaaggagcacttaggccttccagtttgagcaatggtcaactagaggccacccccaccccagtctcttcctttcctgggtggggaagggcgaggaggctgcttttcttcctttcttttacaaggtggtaatctccaagtggcctatggacataaagggctttgaaaggggatatttacacagttaaacttttcccccagggcaagtcagcagccctaatgctcctgaacctttaagtcttctcgccctccccccctcccttccttccctctctctccctttccctcctctctgtctcaacttctgtttaaaatgaagtagaaagtggacttctctctactggttttacttgagtaaaattttaatcctgcctacaactgtaaaaatccacagttctcggttgacattttaagattcaaaattctttaaggattcggcaaggtgcttagcggtgaatatagtctgctgccttttaagtgaaagagatggcacgctaacaatatgcttgctgaagaaacaggaagataaagaagagcacaactaaccctagtaattctagtagtcctgggaatggaaaggatgctggagagtgctgactggagccagcctctatgctgaggcttctacctccctgggcatcttcttatatcattctgactttggaaccatgtagagtaatagctaccagtaatttataaaggaaggctggacatgacagcacacttacttgggatgcagaggcaagaggatggcagtaagttcacagtcagcctgagctatacagtgagcaccagctcagtcagggctacatagcgagactcccctgtctctacagagacaccagcagggttactaaacaatcagaaaaccagaaccttccaaattcctaactcccatcccatttagattttagacttccagatcttattccgtttgttgttcgtttgcttgttgttgttgttgttgttttttaagtagtaagatgcatgccacaaaatccaccattttaatgccatttggtttgtataacgtatcagacctgaggccttgctcacgctaggctgaatgtgtgctctaccacagagctaagcctagccccattttatccatgactgagacccacaatcagtgtggtactaggctcatccaccctgctgtcaaccgtcaccaacacagcctccagagccttttctgcatcccaggtggaagctgttcactgacagccctccccaccctcctgctggaattctgcttccccttggctgctttctatccgctatctcttgtatatgaaatcatacaatatgggtccttttgttcctgccttacatctcctcatatggtgctttcaaagttcatgcctagtgcatcatctgtcaaaacttcattcctcatacgactgagtaatattccatgatacacttgtaccaagtgtaagcgaccatggacattttggtgaatcctgtgcttgttcctacactctggctatttgtagtaaactttaagtcttcaagtgctgcctgaggtccagaacaagtttccagtctactacatagagagcaaaagagaagccaaaggtattttttgagccctgccagtttgaaagcaatgccctcctctatctggaattagtttggagctaaagcccatttagaacataggaaatagccaccgaaatgtaaccatttcccaaacatgacgtggcagctagacagcaatattaatgaacacaggctaatgggaaacactagtttctgagtctgtgtgtgtgactccaccctctagagagggtgacctgagagtatgtgccctctccctgccccagggtggcatgttaagaataaagcaaccaagtttagaactgggcaaagggagcagcgacaatttaggacaagttcacacagttgcttggccactgaccctgggcaaatgtcccctcgtctctcaatgatggatggtctagcaactttgactaagctaagtaatctaggttccaaagccagctgccagatttctttcctttttggaaagagcccctaaaggcatgttgatttaggagcatcctctcacggttgactctgtcagtcacggtggtcatacggaagcagggccacttaaaggccaggaatgagaaatggagcctttagtagggagttctccatgattttgaacgggtacttctgtctttgggaagaatgatgtaaagaaggctcctgataatccactccagcttctcagatgtacagatgaggaatttagcacaagggaatcttaggatgtttagcctataccagagctcattacacaggtactaagaacttcccagccattgggaagcaagttgattttttccagcaataactattctttcattaaaatacctaccttgaaaaagaaactgtaataaagccaaatatttgactctggggggaaaaatgagtttggtagtaatccaaagcagttattaaaattgttttgtcaatacaaggatttatagtgtcttttaaaactctatatatgtgtgtttgtgtgtattatatatttcagaacagcttacattttcagaaaaattgaggaaattgtacaggggggccttatatgccccacacccagtctcctttgcttttaatgtgtacaaattaatgagctgtaatttaatataacagtattgacccagttttaggaacagattcaaacttcatccccacacccctggttatttcatctttgagtcccagggcggcagatagatacgacattccattcactgatcctgtcccttagactcctggcctggaagaggttctcaggtgaaagttgtctgtttgcttaggctggagttgtggattgtaaggaggaagagcacaaagtaaaaccccgtctcatcatgtcaagggtccattttgacaatgtatgatgcctggcacctcgatgacacaactgaagtcaggcttgtcatgtttcaactcagggaagtgactctttttgttgctatgaccttcccagaccatatgttttggaagtccccatattcagttaatgtgagggaggagttatgtgacactttcctgagcagggaagcgatgcaaatcaccaggtaaggagggactttgtactctaatgaatatttaggatcttctctagattttatagatcatatagatggtttatatattgtcgatttagagaatgttagctaaattgcatctcagaataacaagatttttccctctataattaaaaagaaaaagaggaggaggccagaatagtgatacatgcctgtattcccagacacagagcaggctgaggtaggaagaccagcctgagctacacagggagagtcttgtctcaaaattaaattaaaagttaaatgtgattcatttgtgtttctttcatccatatcaagagaaaaccaaaaatgtcggttaagaatagaagccagtgaaccagagaatggtgctgccagtaattctgacccgagatccaggtctagaacccacacaggagggagagctgactccctcacgttttccttggatatctgtatataagcgctctctctctgtctgtctgtctgtctgtctgtctgtctgtctttctcccccccccacacacacactttttaaaactggagtgggcatgttaggcaagtagatgtgaatattgcacacaatggctattccaatgatgtcctgtttatcaatgactcaatttcctttttttttttctttatcattttttaaaactgtattaaagcactggaagagggccagagacagagaccaaggatggaggttatactttgcatgtataagagaaaagaacccatgttcaggaaaagaaagccactgcatgaatggattaagcagtgtgcctcaaatttactcaggctaatgtgaacctcctttaagcctaaatccccctgagatgtgtttatttcttatactgtgcactcgaccactgacaacctattgttcctgtgctgcacagtgaattttgataacgaggaccaaagccaacaaccaaccagcctcacaaacacgactcccagagccacagtcttggcattgtccacccaaccactttcccatgacgtgcacgagtcgtgagtgctggctctcagttagatgggcaagtcccttcacatctgaatccgtttccaaggaggtaaagacagacggcggagggtgtcatccctgaggtccttcccaagcgtcgcacctgcatcctgtgccacgtcactctttcctattcttttcgagctacacatcctgttggctgaagttcactccaagttgttttcctactatgtctcaactatggcctgaatccttactttctctctaataaaagattcagaaaaaaatcaagccagtccccacacatctgcgtaagggatcagagtctcctgtgttggagcgccagccctccctaaggagcatgtcttgtgatggtttttttgggtagcttcgaacccccacaattaaattatatttattttttgattccccaaaacctacacagtagaaggagaaacacaactgttgcatgtttacttctgactttcatatacaccatggcacatgtacacatacacacatatacatatacatgcatatacacatacatacacaaacacatatgcacacatgcacacacacacacacacacacacaaaataaattaaaaaaatattttccacccaattgcagtctatcttactcaggaaagtacaaatgaaatcacagggttgatggggagtggtggggttggtaggggttgatgggttggtgggagttggtggggggttggtggagggtggtgaggggtggtggtgggggtttggtttatgctggagctggaagcaagtcaagtattccacagctgagctatgctcccaagcttctcttctcagcacgatccacacacagttatctgccatagcatacagtgaactcacttttctgcttggctgttgggtctaacacattagatgtatgtgttaggtaatacactaatctatccacttctaataaaacagcagatgtcgttctgtacagaaatcgagcacttaggattgaatctacattgtccagtctgaagaatttcttacttcgtatctctgcaaggcagaacatctttatgtctcaaactgtgtatgtgtgtgtgtctgcatgtttgtatctgtatataattaataactttgaaaaataaataatattgtgtataatggggactttaaagcatgcctgagctatctgaaaccaaaatatgttctcgattggctttcatatttaagaaaaaggggagaaagagtagtgatggggaccttttgcaatgaaaaggttctacaggatgaaatcttaaaacacaatactgttgctatgtaatttaggctttcccacagcggtctcctctgtacccttgaatctattaatgtttatgccatgtgcttagcattatccataatacagaatgattccaaagcacaaaacagttgaatttgccttagagaatccacagctttcagcttggtgccattgtttggtgtgctggatatttgtctgacttaacattcagtcggaatgacaatggtggcctttaatgccagcactcaagagacagaggcaggtggatctctgtgagttcaggacagccagggctacacagaaagacccagtctcagaaaaacaaaaacaaacagaaaagccaaccaaccaacaaacaaaccccatttaaatccatgtgcaatactttcagcactgcaagtttggggctatgctttctttccggttattttttgagtggaacacagatttagaacattcaagtcttgagttcctgctttagaagaaaacacttcagatgagactaagtttcctaagaccaaaccacttagacccatcctgatctggtcaagtgagatggggtggccatgtgctagggataatttatacagtagacaaatgtaagaacagttttccttcctcttctagaatagagttgactgtgtcctctctgtctcaaagatggaaggtggtcttgtgcatcttacgctcaaattggtgctctggagagttaggaactagtacttaggtttcctcagagtcagtaggcctattacatacaaaactaacaccttctgacgtgtgtcatattggagagtaataaacatgactagaagctggttatcttacatactaagaattaggagttttgaagcagcctgtgtggagttcacagattcaacaaaaccttaagaagagttcatatgttcttaaaattctttccttcaacaatcttcctgcagtctgtaaaagataactctggtaacagtcacttcttcctggtggtctgttgtgagtttaggactgacattagggaaataagtcattggatacttcttctacctcacctcgccccctcagcacagggctttgaggtggagcaagcatgctaccattgaccaaatcctcagtcccactgagatgactcctttgaagaggcttgtttccttttgccttgttgtatagctttcatcaaaggtacaatcctatgcatgcatttgacttactgagcagaaaagggatcgacatacctttctctgatgtgatcgatggaaggggaggaacatggatttatgggaaagggtggactgaaagaactctgtccaccaaggatgggtggggcctaagaattagcttctgaggagtccgggcctttgataagcagttctttatttttcttctctcctgtaggggattcttttggcatctggagatatctgattgcaggcaggaggatagagagtaagagcaagtacgaagcagcaaacaataaacttcccatgtgttggggaacatggaagagcaaaaccacagaggggaaacagtgataaatctaaacatgtcccgcagttaagctcgagcaaatggcagagagaatgtaagacgtgctccctttaccaaagacacgtgtccgagtctaagcaccacctaccgaaacctacatcttctctttccctcgcttcccccactttcacatcactgagatttgcatccccaccacccacctcattctgccacaatatgccctgtgtgatctattcagacctcattaaactgacgtactgggcccactggctctgctcagcctcagtttattccaactttgtttaagattcgggaagtgctgggggcggggcaggacattaatcgctgcgcttgtgcaaacggagtgccagctgatttatggcaaaggttataaaggaaaagtattaaccatgcctcgtcccatttggcaaaaccatcctgcacaatgtccacagaaaccccaagagtcctgttttgtggaaagaaggggggaaaactccaccaaagatacactcttcttcttttgagcattaattaagacagtaaatcacgggccacatgaaacaactgtattcgacagaacgtggatggtccaggaactctgctggagttgtgtgagtggtctgaatacctccgccaaagccctaaagggagggcagacttcaaagggcactttgggcatgaaggagagatctgctccatcagggagagaaacggttgtaaagtacagactgcaaggagaaatagtgatgaggaccagtgcagaggggcagagggtaatgcagctgtgggctttttcttaaagggaccagataagtactcggtagtgtatactcttttctaaaagaggaacttggatttcatcatctaggaatgtcttccagatgaaaacatacctctgtttttaaggagagtaaaggaaatcgtctctgttttgttgttttaacattggtatttttaacccatttgaaatggcctctgtctgttgtattgactatccaccatatcccaccactggatcctggaccgtttttttgttttgttttgttttttttgtttttgtttttttacaagcttcagtgagttcaggacatgtgagccatgagtagtttgcaaagagtgactttatcttaactcacttgcctccagacagggtcagcacttcgcacagaggagggggaatattttggggagaccttgtgtacgttccccttcagtcactaagttcatactgaagaccttcaacgatacttttctctcctgatttgtttttaactgaatgtcttcgcatttagggccgagggtttctttttcttctgatagggctatgtttctattcagttttccttacactaaggtgtccaaaagctccaaattcatacagatcctattgcctctgcctcctgagtggtgcgctaggattataaagcacgtgcccaggttctccttcctatttgaatcctagcttataatgcatacatgtgtatctataagcgtgtaagtatgggtatagtataactcctagaaaggagaccaagaaaaagaaatatcagttgataaggaaggacaggaggcaagccaaaggttctgtgaattgcaaaagaggatatatataaagacaatttttgtttcctagtttcaactctatcctagttttttttttaatatgtgataactggcatctcatgatataataaatcttgatgtgggttcccagggttcatccaacttggcatttagagtttagccatttagagttagatccttgtatataaaacatttcatcaaaccttgacgattttcagcctttatttcttcaaataattttcccaccccctctctcataagactcttgtgatggatacgctggttagttggaatatgtcccatttgtgatagacatactggttaactgggatatgtcccactcatgatggacacgctggttaactgggatatgtcccatttgtgatggacatactggttaactgggatatgtcccacttgtgatagacatgctggttaactgggatatgtcccactcatgatggacacgctggttaactgggatatgtcccacttgtgatagacatgctggttaactgggatatgtcccactcatgatggacacgctggttaactgggatatgtcccacttgtgatggacatgctggttaactgggatatgtcccacttgtgatagacacgctggttaactgggatatgtcccacttgtgatggacacgctggttaactgggatatgtcccaccagtctcttgggctttgcttttgtcaggccttttctttttatcccaaatacctaagcagctccttgtctttcctttaaacttgcttacatctgacaaaatgcccctggcagaagtttgctttggaatattttagtctccttgtgatttttctctctaattctgtttctctatctcttgactttatttgcctttacatcttcagcattttaagctgttttaaaaacttcattttgtaagtctgccacctgcattcccaagggattgcttcaaccttatttttagatcagcacacttttcttggaattccttgtgatttatcttttttcccccctttttggtttttttgagacagagtttctctgggtatctctgccagaaaacaaagaacctgaaacaatgagtagaaggtatatacaacaaactctgagagatcttatgcctgcacaaacccatgattagagtctgtagtcaatgatcaaaatacagatccccaaatttgaaggcagaatccttactggttgtttgagttcccactagctgctgcaagatgtgcaggaatctattcataggtgcctatcatgatcctagaggttaagggaatggatagccactgttaagattaaaaactaaaattgaccaagtttacctccaatttaccattcaagccttcccttacaaattgcagatattcaacggactacacgctcccagatggttccatcagacagattttgccagtgtggtggttgtgtatgtgtaaaaaaactgactctttactgacccacctttccaaagctctcccaactgtcactgttattattatgactattattttatattgttaagaatgatatatgatgggcaactggtctacctctagactacataacccaagtcccctgcccactatcatttcaaatgcataactcttcatatcctttcgcatgtactttcagcaattttgtcctgacttgaactgattactcttaatggactatggctggcatgatcaaatgagatactgtgcatgcatatgctttgataccctttgaaaataagtaaattatcctcttttttaaacccacattctttataagtaggccacaaacttagaaaaatacagacaatctatgatataagtagtctctaagatgtcctataatcacctctgtctttttattgggaaggtaaggagaagctgagatgtgccctctaaggataaacatttttcaggcaaacaaccattttatgtgtacaggttttattattattattattattattattattattaaattaagagtaagtactgtttactgatctgagtattcattcataaactctgatctgaggttgacttttttgttcacctaaaagaaaagggaatcaatccccattatacaaatttgttgttttatttgatgaagcctgaaatataagcacctggaattaatgccctttcatctcctaagcattaaattcaagtgtataattttagactcgatttgttccgtgaaacatgagtaatacttaaaataagctagtttgcagaatgacagtactaagtgggttagtcacaaatctattgtcatagaatattagaaataagtatttcttgatgacattcctgccaaaatcagttagctgatccacagtggcttagggagattgtggttaacctatttcccaaatggtaattaagaaatggtttcaggttcctaggaaaggcttcttagtcccattacattctctctccatcctctcttcctctgcatgtctcatgcttcttttttgtcactaagaccagaccattcaaagcattccctgtatgtttgggcactgcccaccaaggaagaagaaattaagccgccaaatgt

SEQ ID NO: 8 - protein, 823 aa, Mus musculus
MLDLLLEKRVGTTLAAPKSSSGSVKFQGLAETGIMKMDMEDADMTLWTEAEFEEKCTYIVNDHPWDSGADGGTSVQAEASLPRNLLFKYAANNSKEVIGVVSKEYIPKGTRFGPLIGEVYTNDTVPKNANRKYFWRIYSREEFHHFIDGFNEEKSNWMRYVNPAHSAREQNLAACQNGMNIYFYTIKPIPANQELLVWYCRDFAERLHYPYPGELTVINLTQTESNPKQYSSEKNELYPKSVPKREYSVKEILKLDSNPSKRKDIYRSNISPFTLEKDMDGFRKNGSPDMPFYPRVVYPIRAPLPEDFLKASLAYGMERPTYITHSPLPSSTTPSPPASSSPEQSLKSSSPHSSPGNTVSPLAPGLPEHRDSYSYLNVSYGSEGLGSYPGYAPAPHLPPAFIPSYNAHYPKFLLPPYGISSNGLSTMNNINGINNFSLFPRLYPVYSNLLSGSSLPHPMLNPASLPSSLPTDGARRLLPPEHPKEVLIPAPHSAFSLTGAAASMKDESSPPSGSPTAGTAATSEHVVQPKATSSVMAAPSTDGAMNLIKNKRNMTGYKTLPYPLKKQNGKIKYECNVCAKTFGQLSNLKVHLRVHSGERPFKCQTCNKGFTQLAHLQKHYLVHTGEKPHECQVCHKRFSSTSNLKTHLRLHSGEKPYQCKVCPAKFTQFVHLKLHKRLHTRERPHKCAQCHKSYIHLCSLKVHLKGNCPAGPAAGLPLEDLTRINEEIERFDISDNADRLEDMEDSVDVTSMVEKEILAVVRKEKEETSLKVSLQRNMGNGLLSSGCSLYESSDLSLMKLPHSNPLPLVPVKVKQETVEPMDP

SEQ ID NO: 9 - DNA, 26379 bp, Sus scrofa
gggtttctgagaggcgagctgtttggatcattcatgatttgctgccattgtgaacactcttaaggagagaactctgcctgagaaatgctgattaataaaggtaactgaggttggctttttttttttttttttttttttggtgctctaacagggagggaaataatatagtgactaaaaacacaccaaggcattacttagaagcaaacactttgagatgtaaagactctaggcaggggcagccttagatagctagctctctctgcacagctgtaccagtgctgacgtctgcctgcttgccagcatcctaaatgcggtgctcatcgggccttctagaaggggtgagtgacatttggtgggccaccccttctcctctctgcctcccctcctcacccccaagcacttttgtgctggactatacctagataggactatatgaacatgcgttttcttacgacaggggcctgcttccttcctttattccctcttccttttttgcagctttcattttaaattatatcacattaaattatatcccttgactgctacaatgacagtaaaaaaatggtttggtttggtgcttctttggattatttgaagggttttatagtccaacactgggtctcaaatttgactttccttcaagttccactcgtggccttgtccagctcagctggagcacctggaactaattttagggttgcctgctaagccccacgctggtatttgaagtttgcgtcctccctagactcaagctcatttcaccacctctgaaggtgagtgcaggctgatattaattaacagtgagttgattcactggcatcttccagtcattagagtaaatatttggcttaaaggagcctcttcccacctcaaccttgcaactttttgcccattcctttaccccaccacggttgactcaccagcacttgcaggggtgtatatggcctaagacaagagtttggttctaaaagggaagtgagatactctttaacatctgcaggcgagactgtttgaacagcaggccggccttcagtatgactacattgtttttttgtccatgcgggcgctgactcagcatcagttaataaaccctctggagaaggctggatttctcttgtttaattatcatcttggcgctttctgagaactcttgtaaggaattgttcattcagttttatacccccagcacgtgtgccgcctaaaagtcgtgtttcctctgggtgctagcgtcccctctggcataacattgcaatcgcaggtcatcaggcagtgagctgggagtgtgggttacttatgtcccctagtgggaatttaattgttcagtactacagagattgtggaatgattttagactcaagcaccatgtcctggcaaaaaatcttttgcctcccgtctaaacccccccaaaaaaaattctaggaaatcttcttaaaagagaaaagaaatttgaaaggtaaacagacattttttatgattgagttgggcttttgttttgctttgttttgtttcttcctgtaaacaaatactcacatgtccacttgattgtgtgactaagttggtatcattggttgggactaggtgtgtatgtgggggtgtgtgtgcctgctgggactgggtgtgtgtgcacacatgtattgaaactgttagtaaagacactggcagccaaaggttgaaggagagagaatttttagaagggcagcaggaatagtgggagacttgtgtcgcagtgctccagacagtccttgtaatggggtgtctgctctaaacggaccccttgcatcatcatttccctgaattagaggattccttgctgaaggcacaagaccactgaaggaagtaaagcatctggtttgttttgtaatgagaagcaggaatgcaaggtccacgctcttaataataaacaaacaggacattgtatgccatcatcacaggatgtccttccttcaacagaggactgactggggctggagcaagagcgggacagggctcccttcgaagagccccactaattactgcctccgtctgccttccacttgccagtgatcagttccacattccctttaactaggaaacattaacgctctacactttgctcacacactcctgggaagtctgcctgtgggtttgggggaggagagaaaaggcaaagacattttaatatgtaggattataacttcttcctatttccctctttcctaaatagttgaaagaaggaagtcagttctactaaatttgagtgcgcttttagttagcaagagaaatggaagcttacaagtaggggaggagaaaatgggtatttcacaggcaatagcttgaggactagacagctccatctttattacagtcaatgcaaaaacaattgctcttttcacgtgctctcttcaagtaaattccgtgtgttttgtaaccggatctgcgccgaggaacaacgccaacagttgtaggtaatttttcggtttccccgaatttcaggaatgtgcgcccccttccaaagccgcagcaggaagaagggcggtctggagtatttagaatacaatgcggcccgagttaacgctgaggttaagcgccttcaaagggaagtcagaagattccaagtcaatgttgaaattcgcagagcagagaggaagcggcaggcgctggcgagctgggggaaagccctggccgagcgcggcgcggcgcggccgagtccaggtgtggccacgcccccacttcaggcagctggtaggagtgaatcagaaatccgcagcagggaggggaaagggccgagccgccggccgggttaacagacagaaagtgctgccgtgacactcggccctccagtgttgcggagaggcagagcagcgcggcacctgtccgcgtcgggagccgggacgcgggcgccggcggccggagcagagggcaccgcggcggtgcgcgacagccctcggcggggaggggaacgcggagcacatgcggactgtgtagggatgagcaacacttatctccgatgttggatatttgcttggaaaaacgtgtgggtacgaccttggtaaggaacttgatcttgtttttaaatccgaaaactttttttttttttcgtgctaacgcagtcgcggtagacaccagaaatgcttgtgctttagggcacttggtgctgtcaaacatttataagactttttccttatgaatcattaaccctttcagttctaggcataattgtcagttcattgaaatttcagtagtggctcccgcccaccccaccgtcacacgaagtgactattttgggtcggcttcatttaaattttttgttttattttaacatttatttggcatcgtgactatatctgtggcaaccacatagacgtgagcacttttaaatcgtcacggagggaaagacaacttcgcatccgacttttttttttttttttttttttaagagcatcatattcagggaagaactagaaggtaagagccaccctgaaggacttcgacagtgttatgtttacattctaacgaggacacgctcttacatggaaatgctaccctcgttccgacttttcccccaacgcgttggtatgggaaaactgcggacggtgtttacctctcttctctctctctctctctctctctggaaagcactcttcctgcgtgtgaggaggatttgcgggaatacccttctcaatttacaagtggaagcagagctcgctttctcagtcttctgtatttgttataactttagttacagtaaactgtagcccatcagcgacttctgggaattcgtacactttcagatttaaatggaaagtgctatttgtagccgaggactcctaaaggaattctctccagggaattctattgaacagtcttgtgttcggttttttgctttttcaagatgcccacggtcaaaagaaactgcggggagttgtcgcgcccccctcccccccatctttcctccctcttttcctatggtccaaatgtttctgaaaagatgcagctcagtgatgctggcaggatgcaacccttttcagccttccatgtgagaggatgaaagagatcgcgctgcagagggggttgggggggggagttgttttgaaagttgttttgcgttgggagctggtgggaaagttcagtcttccccatttggaaaagtcaggctgggttccgctcctgcaccacacgcgctttccatttttagcttcattcagaggcagacagagctccttcctcttcctctccttgtttgtgacacttttctgaggcagcttttccacagcgctgagggtctggcggccatgaccccaggcgtccagggacagaggactgggcgcctacagcatttttctgccctgagaggtaaagctgggaattgttcagaggtggttcttttctttttctttttttttaaactatttcccccaatgaggttgccactttttttttttttttaaaccaagggaagcacttaaaaccttgcttctccaaggcagtcttctttatacagctttttggctcttactcaactgtaccgagcgctctgtatctgcttttaaagtcttcagacgactgtgttagtcatagcctatcggaggagccacaggacaatggggattaaaggcctttcccttctcttccaggctgcccccaagtgtagctccagtgccgtgaagtttccagggttggcagtggggaccgaggggaccatgaaaatggacatggaggacgcggatatgactctgtggacagaagctgagtttgaggagaagtgtacatacattgtgaacgaccacccctgggattctggcgtcgatggagggatttcggttcaggcagaggcatccttaccaaggaatctgcttttcaaatatgccaccaacagcaaagaggtaagcttctggtttcttgctgaagactggcacctgaagccaaatctccctacttgcccttgaggcctggtatccctgggagaaactcttaagtatcagtaaataattgatcacttaattcacttctttcattgctttctcttgccctcagtgggcccctcctcattttctccagcccgccactgttccatacttattagtaaacagttaaatcttttggcaagttgacacgtcctggaagagctaagtggcagcaaggggtgagtgagattgtcagcaacttggagaaaatatctggccactctggactcaccggcccttgacctctcattgtacaatagcttttgagggagaaaactttttggtaggggggaaaaaaatgtttttcatgtttcctttgtctccttttggtcatgagatggctttattcttttttaacgagccggctttattagctgggtttctaaaattattctcaaaaccttgacgtgtttatgaactgatggtataaatggagaagaggttcgtgtaaaagtgtcctctgtccgcatgacttcagcgctaaccactgtttatctgcacagctcctttgctctggctgggctggcaggcccattccttcttagcctctgaagtgggtacactctttgttgtttcaaaggggctgaaaacccaaacttggaatgaagcagaggatttgtgtttacccttttatataatgattatagctaggcgtgatgtttagctgttgaaataacttgcagaaccacctcttgttttgagaattcagctactgcagttgctctcattggtcgactgccgggcttaggggaaggaatggacccttccagaccgtcgcccccactgcaggtcactgtcagttctcactgccttcagaaaggagtggaaaggggatcatttgctgtaggaatccagaatgcgatactgggactattacaactgagtcacatcactttcctccttctctaaggaacagcgtttgaaggggtgtagagcctgtttgggaaatactttgtctctttcctgtttgtgcatctgagttcagtgttgttggtgcgggggtgacacagctgtctaaaattaaattgagcgactctcctttgagtttcattaaagcgcaacctttctttctttttctttattattttttttttcttttttcctgctgggagaaaggaggctgatttcacaaaaagcaaaatttaaattgtagttggacattaccaaaattttcaccccaggaagtttccttgtggctcagcgggttaagggtctttctagtgctgccgcagctggtcaaaactggtacgggttcaatcccaggccgggaacttccatatgagcccagcacagctaaaaaaaaaaaaattttttttttcaccccagagattggccttaattacacctctttctgaaagtaacactcttctgcatagaaaggctcttaatatgtggcctgtggagtcactgtgtgctttgagtatttaaaatttggctgtgcctatggctttaaaaggtgtagcattccccccccccgccccccggaatatcaagtttgaccaaatattggtatgttcataggtttcatttgtgctctgttgccctgtccaaccccttggaattgaaataaaggcctccattctgtgggtcacccttgccttttagttctgcagtgttcttaccctcagttcagctcttaagtctttcacttttcatcattctacttaaaaatcaaagctaaatagaatgacgcccttagagcattagtccaaggttcagaaagatagtcacttaaggtgtatagttagagctagagcaaagttcttcagacttccccaaccgagcttcttgattgtgctacactggcccctcttggtgtcactgtggttttatttattgtcttagcatatctcagcccgatcctttattaagcttgtttggtattttttctctgaatgtggagctccctgtttcagtgcattcaattcccaaaaagcatatagggcctgtgttcctaaggaggttccttccaaacccacctaataagggatcaggattctcttattccattttcctctactaggaaatgcttgaagagggagcagtacatcttttgtccctcatcatacaagcaaccaggaaaccaacttaaatgtaatcgtctccgaggctctctctggaatgtgtacctatttttttttttttttttggttttcccctccttcctttttgcactttggcaacggacagctcccttgaggtggcgaaagaaccgtggaattaagccattgagaatgtgatagtggcaaacccgttctagaacagacaccttcaggatggatgaaatgtttacattgttgttatgcagttggttccttcagacccacgagctgtggaaagaggaaaaaaagcctttgtacgtgtagtttttatctgactgatttatcttgccctgctttaaatgttttcatttaagtagcagaagatgttacaccgtgtgctgttgtgctgacatcctggggattttttttttaacaaaaccatttttcattatgaatttgtgctatgtgtcagcacctttttttttggtttaaaaacaaaacatacaaaccatatttctgatcttgaccctcatttttagatttggtttagaatcattccgcacctttaatgaggccgttcttacttcctatttccagaactcaaaccaaatatagacctactattcaaaaaacttttaaaactttttaaactgctgggctattcttttagggggattttccccttgtcctcctgaaataatcttctgtgaaaacttgaatacagaaagatatcaacactcaggttctaggcgcggtacgtctgtactgagggtgtttgcattgaagagactctgtggctctgcgtctgacctcccagaattgtgtggcaataggcatcaggtgatgcttatccatgttgattgaagtccattattaactaaggccatgtgtaaaaagtatctcaccaaaccatgcaactccctttcattctgccttttactggggagaccatggaccgaggcatagccacattgcctttaaaataaagataactaagaaggaaagcttccaaaaatatctctatctacttcacccctttaaaaaaaatggggtgaagtacaggctgaagtcttggtccactgcagaggtgtagtcatctctatgcaaatatcctggtattcaaaatagaattttaattgaatgagtcattttcgtggagggggaggggaagaaagagctagcaattacaatgattttgatataatttggggtgaggatgcttataccagatttagacctgaatgatgtttctacttaaaactcattgccatgcatctctaagcttatatgcctaaagagggaatttgctttttaaaaaaatttcatttgccttgctatcagactttcattcagcacccccactccacccatactaagttgtgacaccttcattttgtttgtttgttttttgtcttttgagggcgaaacatggaagttctcaggctaggggtctaatcagagctacaactgcccgcctatagcacagccacagcaacgtgagatccaagccacttctgcaacctacaccacagctcatgccaatgccggatccttaacccactgagtgaggccagggatcgaacctgcatcctcatggatgctagtcagattcctttccgctgagccacgatgggaactccaccttcattttgtaaaatggaaaacaagccctgttttttgtctgcaagccgcagacatcagggtgtgttgtgtaactgaggtcacaggcagacaggtttgcccacgtggtgaagtggtctgccctgagcgggcaggcagggcagggaagtgttgaggccggcgccctccagttttgggatgacacatagcagccagtccccagcagtgatgctttaggaccctggtcagttccagcaacatttccttcctgagctaggtgaaccctttctcaattagtctttttagccgtgggaaattcatggcacacaccaggttcccgtgttttatgtgctggctccaaagatagaacgttcttggccaagattcacatccggatcttgccagggccagagagagaagtatgacttggtctcccacttcccattaaaaactgtcctggttcctatccctgctccagttacctagctgagcactggaatcttaaaattggaatcttagagttgcagctcttagatcctctttgaatgacgtctcagacagagacagaggtagagatgaaggtgttgatcatgtgttatgatgctggactgggaagagttcgaggtggtatataagctacacacttccttctgacctcaattctatggtttggtgtctctgttcacctataggtgtgagctgatctgtggcccatgcccagtgcatcacagaacttaaaatattagggctctttcccacttgcaaagataatctaatattgaggctctttttatttgtttgggattgaggattttcatagacctccctttcctcttccttgaccgacgttcctctttttcattgttctcctgttttgcccactgagttgcatgcgtaaggtttcagatggcaagagctacttcaagtgccaccttacagcttcctcagtgacttgcctgtagctgtgctcaaaggccgttgggtagcttatgtcttctacaaactcctttgtaggaacacgatgctcggtgacttcttttggatcataagaaaagggtgtgtgttttcttagtgtaagattgatagctgaataccacaaggcccatggttaaaagaatggcaattcagaagaaaaaccctgacctcaatgtaatgctgcttgtgggtaatcaagctctgactcccaagacactgtctgccagagactataatttaaaacaaagttgatgaaccagttgagtacctttcttaaaatgactgctttaaagtggatatgttgaaaatatcaactgctaattattggctcaccaacaaatgacattatttgttttccctgtttggcgttttaatattatggaataaccactcagataggaatgctagatgatttatgtgtcatggaagctgattccctgaattcttccaattaatttggttcaataatatatcataaacaatgagcctttgagtaaataggtctacttaagcttcagtctgtatttttatctcaaaactgttctcaaatactcccgtcccccactgccaacatataccaataacgatgaactgttatgaaagggcagatagatgtaaatgaggcagaggaggaggatgaagtgaacatctgcttttttcagctctctgccagaaattcataaaggaccaaaaataacattctagctcaccaaccttgtttcagcttgtgttagctataggaaattttcttactttttttttttttttttttttttttttgtctttccagtctgagtatggtccattggcttctatattagatattaattttaaaaaatcattggctgataagtcacatatctgagaaagactggtccatcacaaccatgtaggtgtgcttattctatatccatttaaatggaggcctaaattctggaggagatttaatgaggtattggtgtatgtcgtaacaaaagtcttagattccacagtgaacatttattgattcctgtgttcgggctgaccgtttcgggtgcagaaatgtaaaggagccactggggataataaaagttggaaatcggtcttacgttttctttcccctcttggcccatttcagcaaggtattcagtaagtgattggtaagctgttttggaaaaagaaaataaaaatgggaaagtgagcaaatgaaaaccaaaagaaaaagaactgcaaaatgttgtaagggactattacagagcagttcttttgaatagtgatgaattgcttcctgatccgtggttggtgatttttttttgcacccctcccccacttaagaaatttacgatcaaggaggaactggtatagttaacctgtttctttagcaaggccctataaagtcaaaacgttgtgatgcatccagtctgagaaggtcatttcctcagatcttagaacccacagctctcctcggtataaattccatttcaaaggaagacttttgaccactgttcagaagaagatgctagagaagaacaaagttacttggaagaacgttcttctattaaagagaacttacaagttaagaagaagaaaaaagaaaaaagaaaaaaaaaaaaacctcatctggaatgaaaaaaaaaatagaatatgttttgtttctggttctttaggcctttgtggaacaaccaaggaacattattttggtttctgaggttaaaactcttctattccccttcaacacactgtgtttatggtttgggggagaagaaataggaaactaggaaaacgctgaaaccgtctaaccttcattatctaattctgcagtgtctgaatctcgttctaaaatagaatgattaccctgtcttttcttctagcataaacagtattagtaaaaataaaggacccttagtcacgggagaatttgactatgtatacttggtccagtatttgcttatgatctaagagtttaaaagatggttttcccccaaattaagctcgttgctaattatataagcaccattaatgtctgctctccatagtacagttttgtcattgttggttgtattaccatgtgacagttcaattcattcagatgaaaggatcaattaccattttaccgttgaagtcattgtttcttatcttttaccccctttaggttattggagtggtgagtaaagaatacataccaaagggaacacgttttggacctctaataggtgaaatctacaccaacgacacagttcccaagaacgccaacaggaaatatttttggcgggtaagtagggaaatttttccagactcagtaactattaaggggaaaaaatgaaactaaaattgctgggtcacttcctttttcaacctgtcctggggctcaccacaagtattcagggtctccacggacacggaattttctaagcaaagcatgatgaaactggttaaatgtttggcttggaaaacacagccccgttttcagggaaaacacagggatggagatatggtctctgtgtgaatcttaatttttgcaattcattagagcctttgtgatgaaaggaaacagtttgctgcttgcttcaaggctaagttcatttgcatttttgtgcaaggaagtagtaatgagtcaccaaagccttagatatcaccccttcttgatttcttgctgacttaactttaattgaatggaagagtcatcataactggattacctggaaaataaatgccatgaaggaaggatgggtgcgcggggaatggagatggaccgcatgactagtcctgtttaaatgcatctgtaccataaacctattggatttgacagtatgttggttactcccatagcataaggaaaatgcttacagtcattcaagatgatgaactttcctttaacatcccgtcagagtccaccagtatagttccctttagaagatcacagttagaaatgacctcacagatgaactaaatagatagaatctttgagtaaaagaccttggattaagatgaaaagagaaaaactcgaactgctttcccttttcccagagagctctctgggacactctgttttctcagaaaataaagataccttcactaaatatatttatttatctattttggtttttttttttttgtcttttcagggccacacccatggcatatggaggttcccaggctagggggtccaatcagagctttagccgccgacctacaccacagccacagcaattcgggatccgagccccgtgtctgtgacctacaccacagctcagggcaatgccggttccttaacccactgagcaaggccaagggatcaaacccgcaacctcatggttcctagtcagattcatttccactgctccatgacaggaacttcctttactaaatttaaaagcattgttttttttttttttttctttttagggctgtacccagggcatatggaagttcccaggctaggggtcaaatcggagctgcagctgccagcctacaccacagcaaggccagatctgagcttcatctgcaacctctagcagctcatagcaatgatgaatcccagacccactgagcaaggccagggattgaacctgcatggtcatggatactaatcgggtttgttactgctgagccacaatggaactcccaaaatatatatttgcataacatgtacataattactgggaaaccattatttaaattcttttaaggaacatgtacatggtgacaacaaaaattgcattacacttactctggtcagtatttacctagaacgcttatatctttaggacaagtatctttataagagacatatttggggatcattcagaaactgttcctaaggaacacaattttttttttaatccaggaagttgtgtgtttttagaaatactttagtatttcccaaactgagaattgtccactaagaattgtgtgctcacaaattttatttaataattactcatgcttaaagtatatttaatacctgaatatttgatacctggcaaaatgggagtgcattttcacctttcttgccagtaaggtcttctcagaagtgagctatcgtgatgtgtaattcttgggagtggaaggtcagaattaagacaatccagcccaagtctctttaatgcgtgattcttttgaaaaaagacaagaaatacttacaaacctcctatctctgtcccagttctctggttcatggaagattgactctgagcaactgaagtgctttccttgggaggatttctttgaagcaggtctttctttcacgtgcaaaggatattctagggagataacttcccactgcttgttcaaagcatcctgattttgctggcaggaatatgaacatctgttgtggggaaagaaaaagtttcatgcaaattacacagtcaaagaagattagggatgttcaagttgagaaaccagtgacatttcttgtaactgtgcaatgagtcagcacgtttttaatcttcttgataatatatggaaatgctgtgagggtgagagggagcggcatccacctgacgtatcattactttattttcttgtgggtgtgtgtgtgtgtgcgtgtgtgacttcatggcatcgacatttctgtttttaaatgaggatacagtaaattgtagtccgtggaaggctgactggaatcaacacagccgtagctttagaaagcagtttccgcccagcgaagtgcagagcgatggaaccccatgttcctggaagtttgcacatcagagtaaacaaacttgaaaacccctcttgatagcagaattcacccagccttgttccattttctcttaacaaaacacaccgcaaaagctctcacaagctgctttgatgaagccacatgtatttcccccttcacaatttacaggaagttactcttaaaagaaagtgattctggtgtttactgcccgtgttaaagggacagagttcctttttgtctctgataacgctgacgcgaaatgcagaaagaatttatacacgaacataatcagtaggtgactaaggacaaagccatcacctgctgtctggttagagccaaacttctgctatgagccctgcccaccggcttggagcccccaagttgcagctaagcaggtactgagtgtgtagatgcagggagctttcttaagtctgaagacaaggtgggtacatcttaaacggagggaaagagaagcttttctgtggaaggataaggagtttgtttataaagccggctcaggaagaatgtagatgttcatttctcctattccctctgccttttcaccgagtggcctgagggcatctgttaaccagaattactcttactctagggcaaaccaaattcttcattttggttgctgtcttgaaagaataagctggttgcttccagttctttttccaaacaccccaggcctgtggctctgtgagtggtgtcttagccaacctcctctcctctcctttggctttgaaagaaagctcaaggccaaagctgtttatcaagaggaaaagtgacttctcagtagactgtcaacttttggcttctgtcccggtgttcgttttgttgtggcaggtgaagttcaccttggccccacccagtgtttccacaaaaaggcaaggttccaagtattcagatgaacaagtgtcactgctggacttggaggcttgggggtggaggatgtttgcatagttttagccttgctcgggcaggcgggggtgtaggaaacgggcaagtacagaggccatagaaaacgttgagagactcagtttgacgtactcagtcaggctggtccaatacccagtgactcaaagcattaaaagtcagcataatcggaactcaagttagtggcatcgcctgtgagccattcactgcgcagtagcagaaatagtactaggtggtggtttaatccttctgaagggagctctttaaacgacattttgtttcattctccccccccacgcccccaacatgaaaagacactaaaactgaaatggaaaaggtaactgacaaacgggtgtcttccctgtttccgcccttatttctgctgattcaagaggactccggctaaactgatttccttttcaagtgaggctgtcagggaccagaaagcccactcgggcggtacctttctgaggtgccggggaaagctttccattgcttcggggctttcttttccagtgtgtcttgttctcttttgggcagatctattccagaggggagcttcaccacttcatcgacggctttaatgaggagaagagcaactggctgcgctacgtgaacccagcacactctgcccgggagcagaacctggccgcctgtcagaacggcatgaacatctacttctacaccattaagcccattcctgccaaccaggagcttcttgtgtggtattgtcgggactttgcggaaaggctccactacccttatcctggagagctgacaatgatgaatgacagtaagtggattacagaacaaaaaaattaaaaatgccagtaatgtcagttctgcccctttgtgctaatgacacgttgtttaattacatggttttctctgttgggccaagtaggtggcttaaaccagggactgggaagaggaaaacttttttttttttttttaagtctctattccttagaatgaagtttgatcatttaaaaactactgagagcaactttgggtgttcagctccaaaagttacaggaagaaatctatgtccagtgctaatctctccaaaagggggcagataggattacaggatattagagactggtcctgacatgccaaaaaagcaaagtacagctcctggtgtgtcgtaatttttttcagtgcctaaaatgcacattgaaatattgtagagatgcatatttggttatcaagttctggtgtgatgtgaaaccttgtaagaggttgtttctagaaaaactcagggctataatttttcaaatcttattcaaaatggataactgataactataaagcctttatagcttagcttccttccttatggtaaaaacctaattatctgacctcctgatcagcattacagtaaccacctatcactttatctgaacaaattctcagttccttaggtatataagcttttacttttttatttggttgaagttcctgtcatgacctctctgcagggggctacttcattttactcattctcaagtgatctctaagaatggttgaagatttaccataaaattccaacctgttgtaactatgatggtgtgtcctctaactgctgagttttaaggcagtttttaaaattagctctttttgggggagttcccattgtggctcagcggttaatgaactcgatagtacccatgaggacaagggtttgatccttggccccactcaggatctgccactgccgtgagctgtggtgtaggtctcagatgtggctcagaccccacgttgctgaggctgtggtgtaggccagcagctgctgctctgattcgacccctagcccaggaacctccatatgtctcgggtatgaccctaaaaagacaaaataagataaagtaaaataaaattaacttcttttggtttaaaagttttcacattctaaatgctgaaattttggtaaccttttgtttggggcaggattttttttttttctttgtttttttatggcctcacctgaggcatatggaagttcctgggccagggattgaatccaagccacagctgcaaacatgccagatcttttaaaccactgcaccaggccaggtatcaaacccacatctccacagcgacttaagatgccacagttggattcttaacccactgcaccacggcgggaactcccagtaagcttttgttttgatcgcatttccaacttaaggagaagttgcacgaacagtacaaacaattccgagaccctttacccaaattcatcaatcgtcgatatggtcatcaccagctccccctctgattgccagtatatttgtagttgtccaaaaagctggggctataaaagcttaaggacctccaccatacggtcatctttaaatttgtcttggtgtccttacacactcaagcttagtgcactcttgagcttcaggaagaagtcttggcatgtttggaaacaaactggcgtccaacatgagcatggtggatgtaagcaggtgctggccaatggtggcggtttcttttccctcctctctcttcagtcgcccgagtcgccatcatatcactagtgccaagcatcccaggagccctgcagctacttcaccatctgtaggtaccaggcccaggggcctggtggtaaaaggcaactcatattcaagtaggacatctcccaggccgacgggctgcctcctcctgactgtctccgtagccattcacttcctctcaggggccttctcgcattcctggggcttagtcattcgtggatttggagaaagacttttttttttttttagaacgctaactccatttgagatgatccaccctggtgactttgctccaaccacgaagaagtgttgtcacatatgtccctcacctcctgccaagcgaaataaggctttaaaggccttgcagcttaattccccaaggaaaggctctgcatggcatttttaaggttcagaggcttattctctgtgtccagaagcaacttttgtgtatgccagaaagtacctttgtcccctcgaatatccctttgtatttatgcagaattttttctaaatggtgacttaacccttttcaggtaccaattcattgtccagtattcgtagtaaagaatgagcgttaacaataaccagtgccgttcagccaagattcctgctgctgattgtgaaaccatttgtctcaggtgtggtaactgatgagtgagacaccaatcaggaaaatttccactatttcatcagggctaataagtagattgtgtcttcacatgagttgtgtcggcttccacgcttcaagcacaatagaagcctgtgtcagaacctctgtgaaggctttaaaatggcagtgatgggagttcttgttgtggcgcagcagaaacgaatctgaccaggaaccttgaggtttcgggttcgatccctggcctcgatcagtgagtgggttaaggatctggcattgccatgagctgtggtgtaggtcacagacacagctcggctctggtgctgctgtggctgtggtgtaggccagaggctacagctctgattggacccctagcctgggaacctccatatgccacgggtgcggccctaaaaaccaaaaaaacaaaaacaaaacaaaaaataagataaagtggcagtgatggttcacttggtagagttttgaggagattggaagaaaactgaggtgaagaaaaacaagagccggcatcacaaatcggcgttttgaaagagccagagaaaaggagtcggaaggatttaagtgcaactcccacccctctcaagttttttggttttttttttttttctatctatctaactaacccatctagaaaacagttgaccaaattatagacttctaaatgttaatctgctttctcagtttcagttgaaaacagactttgttttgcctactgcagaacttctaggttctttcttgtagtcttgggggttcttattatagatcgaaaatgtgagtcggcataattaagccattcagagccttcagaagccgttcactcttgaaatgactctgtccgcctacagccatttaagatttaagaacaaaaacagatcttgattttctttttcatgttaactcaagctgctgctgagtgggagggtcagaaatgacaccagctccactgattactcagctgctgaggtaggatttttttaaatgaacctcctatagactccatactcgccaccttggaacaccggaggggggctggcattgccttctggatatggttttgtaattagaaataaatgtatttttatgaaggcataagagagcaacatttatggtggattttctgtacaccaggcacactgtgctcggtagtttgcatagaatattatcaattccaaatttcttgtctgttggctcattcattggctttgttgcagctcattaattggattattgaggtgcttagtaagaataaataggagggacggtggtagggacagacagactttttgcttgtgactttcgtttattaaattttcgaaccaagagagtggtgaagccaccgtaaaaaaaaaaaattacgaggcttagatgtaatttgccacataaaaatggcagaaagttacggtggtgaagtttctatgtgtttattttattaggtggacatctttttttaaagtgtgagcttatgtggatgcctccaaatcattctttttcacctcagaatcctctcctgcggcttctgagatgccttgcctatcagttttccaactgagttgtctctcttcctttaccatttcagctttaaaaaacaaaagtgacaatttgaacttcctgcctgctgagcctcactgaaagactgatattggcctgataaggggatatttattttggtttagtggcttcagaaacccctctccctcaacaagccttccatcactgcccccatcagcatcttccctgatagtgtctgggctgtgtttattctggggctgctggctcaccctggagtaactgataacagccagcagagataacactctcaaactggaatcgaatccctcaagcttgtcaggccagagaatggatttgaagagctcagattctggagctccacagagttcacttctagagacctatcagatatcgagcctggagttctctcttggttaaatcagacagggactttttttttttttttttttttttttttttaagacaacaaactgatactttcgcagaggtgcctgtcctctctaatgccaaggccaggagctctcctgcctcgtggcatctacacccaccaatggctgatgccttcaaccaacgcctacgcctggggcaggtgttcaggctggagccattgccctccaactgccagatttccaagtcagcagcctgtattttacctttggttttccctgctctggctggtgttttcctgaagtattgtttgttccatgtgttgggatggagcagggctggcgatggcctggactacctggaactgtcctctcattgctgctgtccctaaacagtctattgacagagtaataacatgccatcttttggaatgaatgctttcatctcagctgcctgttttctttggtgctctaagtaattggactggctcgggaagagcctgttgtggtttggcagagatggctatgtcacgccttgtgattccaggggacagcattactgggagcctggttagaccagggcctcagtgaaattctggtgttgtcagcaaatcgagtggaaggggtgacatcacgttgtgaatctgttcggcagaggcaatttgaagagggttttatcaaattcaattaaacaagaatcaagatgaaaattgatgactgcctattacttgaaatgagtcttaatctttcacatctagttcacagggtgtgctgatttcctttaggtaaatcgtgaacatgagaatgatttctattaaccagtgacaccccccacacacgtggtatttttccaccccattttcatggaggcgctcctagtctaggtggaacagaacttttctatcatgaggtttctacaagtggaaacaaaataaatccaaacggtgctatttgcttgctcgatgcccgcaccagtgacccgcttttgctgagaaggaacgcgagtggcttgagccttccagaatgagtgggcgtggagaagccaggtgtccctctcggggcagctgtggctcgggtgtgctcggggagcgagcatattgagccaacgtcgcttcaattttctgtctccctctgagtaatcaccctttctttatttcagcacaaatccagagccatccaaagcagcagagcaccgagaaacatgaactttgccccaggaacgtcccaaagagagaatacagcgtgaaagaaatcctgaaattggactcccaccctcccaaaggaaaggacttgtaccgctccaacatttcacccctgacttcagaaaagggcccggacgacttcagaaaaaacgggagccccgacatgcccttctacccgcgggtggtgtaccccatccgggcccctctcccggaagactttgtgaaggcgtccctggcctacgggatggagaggcccacctacatcacgcactcccccatcccgtcctccacgccgcccagcccctcggcgcgcagcagccccgaccggagcttgcagagctgcagcccgcacagcagcccagggaacgccgtgtcgccgctggcgcccggcgcccaggagcaccgcgactcctacgcctacttgaacgctccgtacggcgccgctgaaggactgggctcctaccccggctatgcgccagcaccacacctgccgcccgccttcatcccgtcctacaacgcgcactaccccaagttcctgctgccgccctacggcatgaactgcaacagcctgggcgccgtgggcaacatcaacggcctcaacaacttcggcctcttccccaggctgtacccggtgtacggcggcctcctgggagggggcggcctgcctcccccgatgctggcgcccgcctccctccccagctcgctgccgtcggaggggacgcgccggctgctgcagcccgagcacccccgggaagtgctggtgcccgccccgtcgcacagcgccttctccctgcccggggcggccgccagcctgaaggacaaggcctgcagccccaccagcgggtccccgacggccggcaccgcggccacggccgaacacgtggtgcagcccaaagctacctcagcggccgcggccgctcccggcggcggcaacgacgaggccgtgaatctcatcaagaacaaaaggaacatgaccggctacaagacgctcccctacccgctgaagaagcagaacggcaagatcaagtatgagtgcaacgtctgtgccaagacctttggccagctctcaaatctgaaggtaggccctgcgggggcacaaggcgcattgggatctggttcgcctccccacgggttataaatggcgactttcacagtgcgaggcgggtttgcttttgcttctgccactctgctgtgcgccttgagacaagtcccctccccagagtgtcttctgcacagttaaaccgcagggtttgcgttagatcggtttcaaggtcctgcttctgttctgaaaatcacgtgaggttccatttgttttaacttcatagtgatgctttttctctttagaggtttgcatcataaacgccccagttcctgagcgggagggagttttcggcctcacagtggccggccgagggagagcagagctaacgcatgtggcttcttcccaggtccacctccgggtgcacagtggagaacggcctttcaaatgccagacttgcaacaagggtttcacgcagctcgcccacctgcagaaacactacctggtacacacgggagagaagccacatgaatgccaggtgggcagggttttctgggtagaacgttggacctttgtagatagggtcttaggagtcgtcctcccatcctcccatatcccatggtttaaaccagcccaggaattctgccttccacgggctgctgatgcacccagaggatgacacagccagcttgcagtgggtggaaaccggtaggggagggacgcaccacccccagcgcccacatggccctgtttgcttaacgccacagcagccggggccacagtgagttttctcccctcccaggttgcagggcgtgggttggcagcctgcccttcctcttggcagctcttaatctcccggtctctccgccccccttctctgccctcttcctcacaccgtaggtttgccacaagcgatttagcagcaccagcaatctcaagacccacctgcgactccactcgggagagaaaccttaccagtgcaaggtgtgccccgccaagttcacccagtttgtgcacctgaaactccacaagcgcctacacacccgggagcggccccacaagtgcgcccactgccacaagagctacatccacctctgcagcctcaaggtccatctgaaggggcactgtcctgcggccccggccactgggctgcctctggaggacctgaccagaatcaatgaagaaatcgagaagtttgacatcagcgacaatgctgaccggctggaggacatggaggacaacatcgatgtgacttcagtggtggaaaaggaaattctggccgtggtcagaaaagagaaagaagaaactggcctgaaagtgtctttgcaaagaaacgtggggaatggactgctctcagggtgtagcctctatgagtcaacagacccgtccctcctgaagttgcctcacagcaacccactacctctaggacctgtaaaggtcaaacaagaaacagtcgaaccaatggatccttaagattttcagaaaacaaaaggtgttttgtcttgtttcttaacttatgacttggcgagtcagggtggctgtaacaaatgcttgtacataattccagttctgcaaagctctcctgacggcacatggtttcccctcacctctctggaattaaagaaggagccccaaagttactgaaatctcagggtataaatgaggcaaagacaatatatatatacatattatatatacttatttacaccccatctatatatttgaacctgtgtattttgaatatttgtgtggatatgtttgcatagccttcccattgctaagactattgcctagccataattattttttcaatgataatccttcataatttattatacaatttatcattcaaaaagcaataattaaaaaaaagtttacaatgactggaagaattccttgtaatttgagttaaatgttgtatttttgtctggtggccattctttgtagataatttctgcacatctgttttaagtacctaagttctagtaaacaaacattacttcagtcaacctccctctataataatggtttggaaatgaagttttggtattgccaaagttaggcagttgatgtgttcattcataggattgtatcatttgaacagcattgtataacttggggggtatgtgtgcagaactatccagtaataacttcagtagaagaaatgaaagagaatcttgtatgtttctgtagatagctcagattccccccccacacaccccagccacagatttaccagaaaggtgacaagaacgctttgccaatctgtctccctccaaaaaaaacaatcagggtcaccccaccccaaagtcatgtgaccattcagagtggccaggaaacttttacatcccagagctttatctgaaaatgtgaagaagacaaaataccacatttaaaaccactgcaaaacattccaaaagcacaggtagttttgtatgtgtgaggtcttggggcatgacatgagtctgggtgttttttttgttggtcttttttgttgttatgtcacaatggcacaaacatggtgctctaccaggaaggattggagttagtcaggctcaggccaccctttttaaaaaaaaaaaaaagccccaaaccggaaaacgggtattctcattgtcttagggtcaaagcgggtaatgaacattcctatccccgacacatcaattgtattttttttctgtacaactcagactttcctcagtatttgtgtttttacattttatggttaacttaattgaagaagaaagggcattgcaaagttgcaacaacaattacctcattgagtgtgtccagtagtggaggaagtgatggcttctctaatttgctaccagaggagaaagctagtgtgcgccagaaagctagaatgcatgccattctgtctcctctgctaagcccaagatgacttgtcggcattcaaggtgtaggggagaacgatgtatatttataaatctatttataccactattccatgtgtatatataatatatttataaccacttcaattgtgagccaaaccatgtaaaagatcctactttttttcctaacggccaaaaaaaaaaaaaaaaaaaaaaaacctttctaagactttgcttaattagcactcaatgacctcgcaatcacattggtgagcctgggcacccccttctcttgtaagagaccctaaatccttggaacaaaggtggagaccgagtaacaagcagggagaaagagagacatcacttttttactattaaaggacaatccaagatggctttatttaattttggggtgggggccacattctgacaatgtggtcaaacccaagtcccagaaataaaaatcatattgtccactgtaacttttccctctggttgtttgtctccctcctttctgagtaactgatcctgcagaagagaatcctgcagattgagggtaatccagggaacaccaagagccttactgatctgttcctttgatgaaactgacaattttgtatgtctcagtgtttgacaaaaacagtccttaatcgcaggtaaaccaaagcatcagagacaccaaatactttctattcccaaccactcatttgttctcttttccctttgagctttctcctacatggggattttttaccgagacctgaccagtggcttgagactgcttgattctctttatcatctgactttccctctgaggcctcttacatgtgaatgttgagcccacaatcagcagtggttttattattttttccttctactcaaagttaaaactgaccaaagttattggctttttactttgctagaacaacaaattatcttatgtttacgtactggtttacattgttatttatgtgcaaattgtcaaaatgtaaattaaatataaatgttcatgcttta

SEQ ID NO: 10 - protein, 842 aa, Sus scrofa
MTPGVQGQRTGRLQHFSALRGKAGNCSEAAPKCSSSAVKFPGLAVGTEGTMKMDMEDADMTLWTEAEFEEKCTYIVNDHPWDSGVDGGISVQAEASLPRNLLFKYATNSKEVIGVVSKEYIPKGTRFGPLIGEIYTNDTVPKNANRKYFWRIYSRGELHHFIDGFNEEKSNWLRYVNPAHSAREQNLAACQNGMNIYFYTIKPIPANQELLVWYCRDFAERLHYPYPGELTMMNDTQIQSHPKQQSTEKHELCPRNVPKREYSVKEILKLDSHPPKGKDLYRSNISPLTSEKGPDDFRKNGSPDMPFYPRVVYPIRAPLPEDFVKASLAYGMERPTYITHSPIPSSTPPSPSARSSPDRSLQSCSPHSSPGNAVSPLAPGAQEHRDSYAYLNAPYGAAEGLGSYPGYAPAPHLPPAFIPSYNAHYPKFLLPPYGMNCNSLGAVGNINGLNNFGLFPRLYPVYGGLLGGGGLPPPMLAPASLPSSLPSEGTRRLLQPEHPREVLVPAPSHSAFSLPGAAASLKDKACSPTSGSPTAGTAATAEHVVQPKATSAAAAAPGGGNDEAVNLIKNKRNMTGYKTLPYPLKKQNGKIKYECNVCAKTFGQLSNLKVHLRVHSGERPFKCQTCNKGFTQLAHLQKHYLVHTGEKPHECQVCHKRFSSTSNLKTHLRLHSGEKPYQCKVCPAKFTQFVHLKLHKRLHTRERPHKCAHCHKSYIHLCSLKVHLKGHCPAAPATGLPLEDLTRINEEIEKFDISDNADRLEDMEDNIDVTSVVEKEILAVVRKEKEETGLKVSLQRNVGNGLLSGCSLYESTDPSLLKLPHSNPLPLGPVKVKQETVEPMDP

SEQ ID NO: 11 - DNA, 22293 bp, Bos taurus
atgttggatatttgcttggaaaaacgtgtgggtacgaccttggtaaggaacttgatcttgtttttgattctgaaattgatctgaaaacttcgccccccccccctcctcttttcggctaacgtagtcgcagtataaaccagaaatgcttctgctttagggcacttagcactgtcaaacatttataagactttttccttatgaatcattaaccctttcagttctaggcataattgtcagttcattgaaatttcaatagtgactcccgcccacccccgtccaacaaaagtaactattccgcgttggcttaattttaaattttggttttattttaacacttatgtggcatcgtgactgtacatgtcgcaactacgtagacttaagcacgtttgtttcagtcgtgactgagggaaggacaatttcgcatctgagttttaaaaaagggggggtcattatatttagagaagaaacagaagaatggaaaagccaccctgaaggacttggacagtgttgtgtttacattctaacgaggacacgttcttacatggaaataataccctactcctttttaatacgttcctactttttcccccaacacgtctgtatgggaaaacactgcagacgttgtttacctttttaccccctctctctctttggaaagcacttttcctgcgtgtgagggggggattttcgggaatacccttatcagtttacaagtggaagcagagcttgtcttctgagtcttctatatttgttataactttagttacagtaaactgtagcccatcagtgacttctgggaattcgtacactttcagatttaaatggaaagtgctatttgtagctgagggctcctaaaggaattctctttagggaattctgttgaacagttttatgttttgtttttgctttttcaatctggcgtaagatacccacaatcaaaagaaactgtggggagtttgccccctgccccccacccccatctttcctcgtcttttcctatggtccaaatgatttctgaaaagctgcagctcagtgatgctggcaggatgcagtccttttcagtcttccatgtgagaggatgaaagagatcgcgctgcagagggggtgtgggggggggtaagttgttttgaaagttgttttgagttgggagctggtgggaaagttcagtcttccccatttggaaaaggcaggctgggttccgctcctgcaccacacgcgctttccatttttagcttcattcagaggcagacagagctccttcctcttcctctccttgtttgtgacacttttctgaggcagcttttccacagcgttgagggtctggcggccatgaccccaggcgtcctgggacagaggactgggcgcccacaacatttttctgctgtgagaggtaaagcctgggattgttcggaggtggttcttttctttttaaaactttgtcttccagtgaggttgccacactctttgttgttgttattgttgttaaaggatagcatttaaaaaccttgcttctccaaggcaatctttatacggctttttggctcttactcaactgtaccgagcactctgcatctgcttttaaagtcttcagacgactgtattagtcatagcctctcagaggagccacgggacaatggggattaaaggcctttcccttctcttccaggctgcccccaagtgtagctccagtgctgtgaaggttccagggttggcagaggggactgaagggaccatgaaaatggacatggaggacgcggatatgactctgtggacagaggctgagtttgaggagaagtgtacatacattgtgaatgaccacccctgggattctggtgtggaaggaggcacttcggttcaggcggaggcttccttaccgaggaatctgcttttcaaatatgccacaaacagcaaagaggtaagcctctggtttcttgctgaagaagattggcacctgatgccaaatctccctacttgcccttgaggccttgtatatctgtgagaatctgtaagtatcagtaaataattgatcacttaattcacttctttcattgctttctcttgccctaagtctgtccctgcttattttctccagctcttgactattccatattaatcagtaaacagttaaattttttggcaagttgacatgtcttagaaaagccgaattgcagcatggggtgggtgaaattgtcagcagcttcgagaaagtttcctgaccgctctggactcactggccctcatcacccagtacaactgctttggagggagaaaactttttctttgagaaaaatgtttttcatgtttcttttgtctccttttggtcatgagatggctttagtctttttttaacgagccagctttattagctgggtttctaaaattattctcaaaaccttgacgtgtttatgaacagaagtgatggtgtaaattgagaagaggttcatgtaaaagtgtcctctgtccgggtgacttcagagctaaccactgtttatctgcagcagctcctttgctttggcagggctggcaggctgattccttcttagcctctgaagtgggtacactctttgttgtttcaaaggggttgaaaacccagacttggaatgagcaaaggatttgtgtttacccttttatataatgattatagcaaggcgtgatgtttagctgtgaaaaaacttgcagaaccacctcttgttttgagaattcagctactgcagttgctctcgtgggtcgactgcagggctgagttgaaggaatcgacgccaccacagacttagcaccaccattcccgtcactcactgtcaatcctatcactgccttcagaaagtcgtgaaaggtgggggggggcggtcttttgctgtaggagtccagaattccatcccgagactattcattaacaaccatgtcaaatcactttcctccttccctaaggaacagtatttgaaggcgttgagagctgatttgggaaatacttttgtctctttcctgttggtgtgtctcagtttagtgttgttagtgagggggtgacacagctgtctaaaattaaatagagcaactctgctttgggtttcattaaaactcaactcccccccacccccgctccccgtttttcctactgggagagaggaggctgatttcataaaaagcaaaatttaaattgtgtttgtatgtgaacattaccaaaaacttgaccccagaagtcaggcttaattacaccttttttgtgaaagtaacacccttttctatagaaagtctcttagtttgtggcccatggaatcagtgtaggatttgtttgggtctgtaatgtttgtctgtggctttaaaaactgtagcatttttttcccagatcaaatttgaccaaatactggtctgttcccagattttaattgtgttgtgttgccctgtccagccgcttgggattaaaatcaagacctctactctggttcatccttgccttttagttctgtagtattgtcctcatttcagctcttagcctgtctttcaattttcatcattctatttaaaataatagctaaatagaaaaaacaatgcccttagatcattagtccaaagttcaaaaaactaggcacatacttaaggtgtatacttggaggcagagccagacttggagcaaagttcttcagactttccaactaatgcttctacattgtgctacactggcccctcttggtgtcactgtggttttatttatcgtcttaacatacttcagaccaatcctttcttaagcttgtttggcgttttttcactgcatgtgtaactccttatttcgtatgttcagcactgaaaacgcatacggtacctgtattcctaaggagggtccttcagaacaaacctagtaagaggccagggttcttttattctattttctcctatttgattttaccgaaatgcttgaagagaacagtatgtctttagtccttcatcataaaagtcagcaggaaaccagcttaaatgtaataatactggcttaagctccctctgtaatgcgtgcctgcttttcagtttctccttcctttttgccttttggaaaaggacagctccctcaagatggtgaaagagaactgtgaaattgagccattgagagtatgatagctgcaaaccagttctaggacaggaaccttcagaatggatgaaatgtttacattatcattattcagttagttctttcagtcccacaaggcgtggaaagaggaaaaaagcctttgtacatgtagtttttatctgaccgatgtatcttgcccttctttaaatgttttcatttaagtagcagaagatgttacattatgtactgatgtgctgacatcctggggattttttttttaacaagaccatttttcattatgaatttgtgctatgtgtcagcaccttttttttttttttttggtttaaaaacaaaacatacaaaccgtatttctgatcttgaccctcatttttagatttagtttagaatcattttgcacctttaatgaggctgttcttacttcctatttccagaacccaaaccaaatatagatgttctattcaaaaaaacttttaaaactttttaaactgctgggttattcttttagggggattttccccttgatctcctgaaataatctactgtgaatacttgaacacagaaagattgatttaaacacttctgttctagaagccgtagcctgaactgaggttgcttgcgttgaattcagaggctctgtggctctgagcctgaactccagcatcatgtggcaattaaacatcaggccgatgatggggactcagtgtccattttgattgaagtccattattaagtcatctgtaaaaagtatctcgccataatatgcaattccctcttcacactgccttttattgggagaccatataaccaggcatttcctttaatataaagataattaaggaaactttccaaaaacatctctttccactccacccccttttaaaaacaatggagtaaagtacaggctgaagtcttggttcactgcagagcactaaccatctcaatgcaaatatccttgtattcaaaatagaattttaatctaatgagtcatttcttttgagggggaggggaagaggtagctagtaattaaaatgattttaatataatttggggtgaggatacttatcccgtcgttagacctgaatgatatttctgcttgaaactcagtgagattcatgtgtattcatatattcctgaagagggaatttgcttaaaaaaaattattctcctttctatcaaactttgattcagcactcctagtccacccatactaagttgtgacatcttcattttgtgaaatggaaaacaagccctattttttgtctgcaggtcttggacttcagggtatgttgtgtaactgaggctgttgatagatctgtaggggtcagcccagcacagagcacacagctgggaagagcgggcaggcggggaagtgtgaaggccagcatcctctcgctggtagatttatgggaggcacacaggagtctgggcccagcaatgatgctttaggaccctggtcagttccagtgaagtttccttcctgagcttaggtgaacacattcttaattagtccttctagttctgggaaattcaaggcacacaccaggtttccctacattatgtgctggctccaaggatagaatgttgttggttgttggttaagattcacatccagatctttccagggccggagggagaagtatgacttagtctcttcccattaaaaactaccctggttctgatccccgctctagttacctggctgagctcaggagtcttagagctggaatcttagttatagctcttatgtcctctttgaataatttctcagataaggatctgagatgaaggtgctgattgtgagatagggtgctgaactgggaatggatagagatagtatatgagctaaacggttccttccagcctcaaaattctgatttggtgtctctatttattcatgtgtgagtatataagtacccaaagctctatggatcacagaacttaaaatattagtgttctgtctcacttgtaaagataatctggtattgaggctcttttatttgtttgggacttgaggatttccgcagacctccctttccagacaattgttctcctgtcttgtctggtgagttgcatttgtatggctattgatggcaggagctctttaatgccctctcatatcttcgccagtgacttgcctatggctgcgctcaaagatgtttggtggcgtatgtcttctgcaaattcttttgtaggaacaagttgctagttgacttctttcggaccataagaaagtgttgtgtattttcttagtgtaagattgatagctgaatatgaagcccattggttaaagaatggcaattcaagagaaaaaccctgacctcgttgtcatactacttgttggtaatcaagctctgactcccaagacattgtctgcaagagactataatttaaaacaaagttgataaaccagttgagtaccttttttaaaattactgctttaaagtggatatgttgaaaatatcacctgcttattattggctcaccagtgaatgccattatttgtttttcctgtttgtcattttaatattatggaataatcactcagatatgaatgccaaatgatttctgtcataaaagccgattccatgaatttttcaaattcatttcaataatacataataaacagtaacctctgaataagtctacttaagctttaggatgctttttaactcaaggctgttataaggtactccgcagagctatactgccaacatataccaataacgatgaactgttattgaaagggcagatagatgtaaatgaggcagaggaggagaatgaaatgaacatctgcttttttcagctcttgccagaaattcataacggaccaaaaataacactctagcttaccaaccttgtttcaacttgtgttgggtataggaaattttctttttttctgtctttccagtctcggtatgctccattggcttgtatattgaatattaaatttttaaaattaatttttaagtcatgtatatgagaaagactggtctgtcacaagcgtgtaggtgtgttctatatctttttaaacaaagatttcggttgttgatgagatttaatgaagtatcagtgtatatcaaaaccaaaatcttagattccattgcaaacatttattgattcatatataaaggcctaccatttcaggtgcacaattagaaaggagccaccagggataataaaaactggagataaatatgtttttacctctcctcttggtccatatcaataaggcattcagtaagtgatttgtaggctgttttgggtgaaaagaaaatcaaaatgggaaagtgagtgaataaaaaacaaaatgtactgcacagtgttgtaaaggactgttacagagttcttttgaataatgacgaattacttcctgattcatggttggtgactttttttttaaaccccacccccgaccccaagaaatttaccatcagggaggaactggtatagttaacatgtttctttttagcaaggccctccaaagtcaaatgtgtgatccatccagtctaacaaagccatttcctcaatcttagaacccacagctctcctaggtataaattccatttcagaggaagacttttgaccaccgttgagcagaagatgctagagaagagcaaagttacttgaaagaatttccttctactaaagagaacttacaaattataaagaaagaaaaaaaaaaaaaaacctcatctggaatgaaaaaaatatattatgttttgtttctggttccttaggcctttgtggaacaaccaaagaacattactttggtttctgaggttaaaactattttattccccttaagcacactgtgtttatggtttgagggagaagaagaaataggaaactaggagcgggctaaaatggtctaaccttgactaattctgcagtattcgaaactcatcctaaaatggaatagttttacccactctgttcttctagcataaaaagtattaataaaaaatattggaccctcagtcaccagagaactagactattatacttggctgaatatttatttgcttatcatctgtgagtttaacagatagtcttccccaaaagtcaggctcgttgttaattatgtaggcacgattaatgtctgctctccatagcacaattttgttatcattggtggtattaccatttgacaattcaactcattgaaacgaaaagatcgattcatattttactgttgaactcactgtttcatatgttttaccccctttagattactggagtggtgagtaaagaatacataccaaagggaacacgttttggacctctaataggtgaaatctacaccagtgatgcagttcccaagaacgccaacaggaaatatttttggcgggtaagtagggaaatttttcccaactcattaagtatcagggggaaaaaatgaaactaaaattgctgggtcacttccttcttcaactgtcctggagctccccacaatattcagggtccccacggacacagggaattctaagcaattgtgacgaaacgggttaaaaattcagcctgggaaacacagcttgaaggtagttggggtgaagaggtggtctgtgtgaatcttaactttttgcgattcattggagttttgtgatgaaaggaaacagtttgctgcttgcttcaagggtaagttcatttgcatttctgtgcaaggaagtagtaatgagtcaccaagtcttagatttcaccccttcttgatttcttgctgacttaactttaattgagtggacgagtaatcacaaatgaattaccttgaaaataaatgccatttaggaaggatggtactggaggaatggagatggactacaagactcatcctgtttaaatgcatctgtaccatgaaactgctggatttgacagcacataagttattccatagtgtaaggaagatgcttacaacattcaagaggataaacttccctttaacaccccatctagtcaatccagtttcctttggaatatcacagttagaaaaaaatctcacaggtgaactaattagatggaatctttaggtaaaagaccctggatgagaatgaatagaaaaaagcagactgttttacatttgcccatccatctctctggatactccgtttcctcaattagaaaataaatttaaaagcaattatatgtatgtatgtatatagacttgcataaaatgtacatgattactgggaaacctttattgaaattctttcaagaaacagttgcatggtagcaacaaaaactgtattgtacttacttgtttagtcgctcagttgtgtcctattcttttgtgaccccatggactatagcccaccaggctcctctgcccatgggatttcccagggaagaatactggagtgggttgccattcccttctccaggggatcttcccaacccagggattgaacctgtatctcctgcattggtaggcggattcttgaccactgagccaccagggaagcccatattatacttattctggtcggatttacctagaatgcttatattttttggacaagtatttttataaaagacctatattttgtgatcacccagaagctgttcctaagaaacaagcttttaaaaaaaaaaaacaggaagttttgtattttaagaaatctactttactattttctgaacaaaagagatcactgagaagtttccactatgaattgcatgctcaaaatttaataattactcatacttaaaatacatttaatacctgactaataacgggtaaaatgtgagtgcacttttgcctttattgccaataaggtcttctgagaagtgagccatagatgtttgtaattcttgagtctaaggtctgaattaaaacaatccagcataagtgtggttaatgcagggtcctttccaaaaaaatgacaagaaatatttaagaacctcctatctctgtctcagttccctagtttattgaagatccactctaagtagctgaaatgctttccctgagaggatttatttgaatttggtccttcacatgcaaaggacactgtaggagatgactccccacatgttgttaaaagcatcccgattttgttggcaggagtatgaacatctgttgtgaggaaagaaaaagtttcatgcaaattacacaaagaagagaagggatgttcaagttgagaaaccagtgacatttcttgtaactgtgctatgagtcagcacgtttttaatcttcttgataatatatggaaataaagtgagggtgataggcagcagtgttcatctgacgtatcattattttattttcttgtgtgtgtgtgtgtgtgtgtgtgtgtgacttcatggcatcgacatttctgtttttaaatgaggatacagtaaattgtagtctgtggaagactgactggaatcaacatacccgtagctttagaaagcagtttccgcccagcgaagagtgcaagagcgatggaaccccgtgttcctggaagtttgcacatcagagtaaacaaacttgaaaacccctcttgatagcagaattcacccagccttgttccattttctcttaacaaaacacaccgcaaaagctctcataagctgctttgatgaagccacatgtatttcccccttcacaatttacaggaagttactcttaaaagaaagtgattctggtgtttactgcctgtgttaaagggacagagttcctttttgtctctgataacgtttgagtgaaatacagaaacactttagagattaacatagtcagtatgtgactaagaacaaagcaatgacctgctgtccggttagagcaaaacttctgctgtgaatcatgccctatgacttggagcctccaagttgcagaaaacgaggtactgcttgtatatgtgtaaggatctttcttaagtcttaagatgagatgggtacatcttaaaaagagggaaagagaaactttctggggaaggtaaagggtctgtttataaagtcgtttcagtaagactttacctttttaccgagtggcctgaggatatctgctaaccagaagtagtagtaactctaggacaaactttgaattcctcattttgtattgcttttaaagaacaacaccgttttttcctcttcttccaaaaacaaaccctagggctctgtgagtggtgtcttagccacccccctcacagataagagggttccctctccctccctcagccttgaaagaaaagcacaaggccgaacacattcatcaagaggaaaagtgacttctcagtagactgtcagatgctggcttctgtcccagtgttcactttgttatggcaggtgaagttcaccttggccccacccagcgtttccacaaaaaggcaaagttccaagtattcatatgaacaagtgttactgctggactaggaggcttgggggtggaggatgtttgcagagtttaagccttgggcgggggtgtaggaaacgggcaagtacagaggccatagaaaaagctgagagactcagtttgacgtactcagtcgggttggtctaatacctagtgactcaaagcattaaaagtcagaatgatcggaactcaagccagccgtgctgcctgtgcgccattcactctgctagcagatggagtactaggtgcggcagctccttaaacgaaatcttgggtttcgttcttctgtaggttttccccaaacatgaaaagaccctaaaactgaaatggaaaaggtaactgataaagcgtgcctcccgtttcctcccttatttctgctgattcaagacaactccggctaaactgatttccttttctaatgaggcagtcagggaccagaaatcacacttgccatgtgctggcaagctttccattgcattgggggctttattttccacgtctctcttctcttttgcgcagatctattccagaggggagcttcaccacttcattgatggctttaatgaggagaagagcaactggctacgctacgtgaacccagcgcacactgcccgggagcagaacctggccgcctgtcagaacggcatgaacatctacttctacaccattaagcccatccctgccaaccaggagcttcttgtgtggtactgccgggactttgcagaaaggcttcactacccttattccggagagctgacaatgatgaatctcagtaagtggattacagaagaaaaaaaaaattaaaaatgccagtaatgtcagttctgcccctttgcactaataacatgttgtttaattacatggcttcatttgatgggccaagtaggtggcttaaactcagcactgggaagagaaaaacaatttttttcagtctctattccctataatgaaacttgatcatttaaaaaatactaagagcaattctgaatgtacaggaagaaataaaggtccaatgttaatctgtccaaaagggggcaggtaggattatattgtaatagagattagttctgacatgccaaggatgaaaggtatagttccttgtttgtggtaatttctcagtgcttaaaataagctttgaaatgtagatgcacatttggttatcaagttatggtctgatgcgaaacataattgttttagaaaaacttggagctataattttttaaatcttattcgaaatggataaccctgaagattttatatcttcgcttccttccttatggtaaaaacctaattatctgatctcctgatcagtattacagtaaccacctatcacttttatcttaacaaattttcagttccttaggtttataagcttttacttttctattggttaaagttgctgtcgtgacctctctgcaaagggctactttgttttagtcattctcaagtgatctctaggaatgatgtaagatttaccataaaattccaacctgttgtaactatagttgtatattctcagactgcttttaaagcaggtttttaaaatcctctccttttggtttcagagttcggcatctaaaagctgaaatttttgtaaccttttgttttgatctcatttccaacataaggagaagttggaagaacagtacaaagaattcccagaaacactttacccagattcatcaatcatccatatgctgtcccatttgctttatctgcagtctaaattgttttagttcacattttggcctttgagacctttgggatgaatgttaatattaacataaattagaatttgacttaaatttttagccaattaacaaaccaattacttatcctagtcaggcataatccaactctatagctatttggtactcatcccaatgatctcccaatgatctcaagactatatttgtagttttctgaaaagctgaggctataaaagcttaaagacctctaccataatatctttacatttgtgtttgtggtccttatgtacacacatatagttacccttgaggtttggggaaaaaaccttgaaatgtttggaaacaaattggcttccagcttgagcatagtaggtataatcaggtcctggccaatggtggtgggtcttttccctcatctctctagcacttgcaagagtccccattatatcactagtacccagcatcccaagagcccttctgctcttccaccctctgtaggtgccaggcccagtggcaaaaggcaacttactctccaacaggccatctcccaggaaaatgtgctgctgcttcttgagggtctcctcacattccttgagcttcatcattcatggattcagaaaaaagactttgattttttgttttctttgaactgtaactccattttaaatgacccaccttggtgactttgcagtaactacaaagcagttttttcacatacatccctcaccttcttccacacaaagaaaggtcctaaaggccttgaatttttattccccaacaaaaggcttcagcacagaattttcaggttcaaatggttattctttaagctctgaaggaacaatcatgttctctatgaaatgacacctttgttccctcaaatatctgttgatgtttatgcagagttttttctaaatggtggttgaacattttcaggtacccactcactgtccagtattcgtagtacagaatgaaagttcacaataaccagtcacagtaagccaagactcctgctgcctgttgtgaaaccagttgtctaggtgtggtaactgatgattgagatgctgatcaggaaaatttccactatttcatcaggtctaaaaggtagattgtgtcttcagatgagttgtgttgggttccatgtttcatgcacagtagaggcctgtgtcagaatctctgtgagggctttaaaatggcagtgatggttcagttggtagagttttgaggagaacagatttgaagaaaactgaagtcaagaaaaataaatagccagaaatcacaaatagttattaaaaaaaaaaaaaaaaggagtaggaattattaggtttaactcttactctcccaaggttgtgtggtttttttttggtattttttttttcagtctatctaactaacccatctagaaaacagttgaccaaattatagacttctaaatgttaatctgctttctcagtttcagttgaaaacagactttgttttgcctactgcagaacttctaggttctttcttatagtcttgggggttcttattatagatcgaaaatgtgagtcggcataattaagccattcagagccttcagaagcagttcactcttgaaatgactccgtccgcctacagccattaaagaattaagaacaaaaacagatcttgattttctttttcaagttaactcaagctgctgctgagtgggagagtcagaaatgacaccagctccactgattactcagctactgaaggatggttttttttaatataccttcatatagactccatgagggcttcccaggtggcactagtggtaaagaaccaatatgccaatgctggtagatagaagagacgcaggtttgatccctggatcaggaagatgccctggagaagggcacagcaatccattctagtattcttgccaggagaatcccatggacagaggagcctggcaggctgcagtccatagggtcgcacagagtcgaacacgactgaagtgacttagcacacacatgcatagattccatgattgacactttagaacacctgaggggggctgacattgctctccagatattgttttttttaataggaaataaatgtgtttttatgaaggtgtaagatagtgagcatttatcgtggagctatgatacgctaggtacactctgctcagtattttgcatagaaaataataaattccaacttttcttgttgttggctcgattgttagctttgcagcagttcaataattggattatggaggtgctcagcaataacacctgactataaataggagggcagtgctatggacagattaaaacttcctgcttataactttaatttattcaatattagaacccagagagtgtggaagctactagaaaaaattaggagactcagatgtaatttgccacataacaatggcagaaagttgtgatggtgaagcttctgtgttttctttttttttcgggttacgtctttttttttttttttaacctgagcctatatggttgcctccaaatcattctttttttgcctcaaaatcccctcctgtggctgagatgccttgcctatcagttttccaacttagttgtctctcttcttctaccatttcagctttaaaaaacaaaagtgacaagttgaacttcctgcctgctgagcctcactgaaagactgatattggcctgataagggggtatttattttggtttagtggcctcagaaatccctctccctcaacaagctttccatcactgcccccatcacatcttccctgatagtgtctgggctgtgtttattctggggcttcgggctcacctgggagtaactgataacagccagcagagataacattctgagggggctctcaaactggaaccgaatccctcaagcctgtcagcctagagaatggatttgaagagttcagactctggagtccacagagttcatttctagacctatcgggtatcaagcctagagttcttcctccattaaatcaagcagggacaacaaaatgatgcttttacggaggcttagcaaggtcccccaagcctgtcctcttctaaggctgaggccaagagctctcctgatggcatctatacaaacccacagctgatcatctctccctacactgagggcaggtgtgcaggctggagtgcttaccaaccaacaaccagagctccaaccaagcagcttgtattttacttttggtttccagggaaggctgagcagggagtggtcggttttcccagctctgggtggttggtgtcttcctgaaagcatctttcgttctgcgtgtttggagggagcagtgctggccatgacctggagaacctgtcgtaaacaggctgtttaagagcattgctgctgttcctaaacagtctgtttaccgagtaataatatgccatcttttggaatacgtgtgttcatcttcgctgcctgttttctttggtgctctaagtaattgaactggctcgcaaagtgccatttgtggtttggcagcgatgactatgtaacgccttgtgattccgggggacagcattactgggagcctggtgagacccggagcctcagtgaaattctggtgttgtcagcaaatccagaggaagggtttgcatcaccttgctaatctgtttgacagaggcagtttgaacaggattttatcaaattcgtattaaacaagaatggaggtgaaaattgatgactgcttattacttgaaatgagtcttcatctttcacatctagttcacagggtgtgctgatttcctttaggtaaactgtgacttttattaacctgtgacaccccgcacccagtatttcgtggaggcacgctcctactctaggttgaacaggactgttctatcatgaggattttaccagtggaaacagtcatccaaacgatgttattcatttgactgatgccaccggtgacccggttttgctgaggaggaactggagtggcatgagccttccagaatgagtgggtgttgagaagccaggtggccctcttggggcagctggggctcaggtttgctcaaggagagagcagcctgggcaatgtcgcttcaattttctgtctccctctgagtaatcatctccctttctttatttcagcacaaacccagagccgtccaaagcagcagagcactgagaaacatgaactgtgcccaaagagtgtcccgaagagagagtatagcgtcaaagagatcctaaaattggactcccacccttccaaagggaaggacttgtaccgctccaacatttcacccctcacttcagagaaggacgcggaagacttcaggaaaaacgggagcccggagatgcccttctacccgcgcgtggtgtacccgattcgcgccccgctcccggaagactttctgaaagcacccctgggatgctacgggatggagcggccgccctacatcactcactcccccatatcgtcctccacgacgcccagcccctcggcgcgcagcagcccggaccggagcctgcagagctgcagcccgcacagcagccccgggaacacggtgtcgccgcgggcccccggcccccaggaggcccgcgactcctacgcctacttgaacgccccctacggggccgccgccgaggggctgggctccctagccggctacgggccgcccacccacctgccgcccgccttcatcccctcctacaacgcgcactacccgaagttcctgctgcccccttacggcatgaactgcaacggcctgggcgccgccgtgagcaacatcaacggccttaacagcttcggcctcttcccgaggctgtacccggtgtacagcagcctcttgggcgggggcggcctgcctcccccggtgctggcgtccgcctcgctccccagctcgctgccctcggagggggcgcgccgcctgctgcagcccgagcacccccgggaggtgctggtgcccgcgccgcacagtgccttctccctccccggggcggccgccagcctgaaggacaaggcctgcacccccaccagcggctccccgacagccgggaccgccgccacggccgagcacgtggtgcagcccaaagctacctcagcggccgctgcggcccccggaggcgaggaggcggtgaatctcatcaagaacaaaaggaacatgactggctacaagacactcccctacccgctgaagaagcagaacggcaagatcaagtatgagtgcaacgtctgcgccaagactttcgggcagctctcaaacctgaaggtaggcctggctggcgtggtcaccccctacccccaccccaccccaccccctacccccaccccacccccacccccgatgcgcggtctttccccgggagggcacacagcgcgcctgggtacttaaacctcttgcaggttgttgattgctgtttcctccgtgtaagacccaggcatggcatcgtgggccaggcagcttgggacctgttacttcccctccccccagtatctgctgattaataaacatctggggtttgggctagaggatcagtgtggagtccctgcttaggctgtgagttttctttagctcagacacgacagagtgttctgaagcccacattggagtttgatttgttctaagacttcaccttgatgcttaagaggtttgcatcctaaatgcccggagtacttgagccgggatgttcactcttacagcctgcagactgggagccaggctaatgtgttgtggcttcttcccaggtccacctcagagtgcacagtggagaacgacctttcaaatgccagacgtgcaacaagggcttcactcagctcgcccatctgcagaaacactacctggtacacacgggagagaagccacatgaatgccaggtgggcagtgttttctgggtagaactttcgacctttgtacacagtgtctcaacagtcaccctcctggtgtcctaaaccaacgtaagaattctgccttccttcggctgctgatgagatgacacagccggcttccactgggtggacaatggtcggggagggaaccacaaccctgtgggagcgtccccacttcgccctattcaccttgcgctgcggtgaggggccacagggagttttctttcccctcccagtttgtcctgcgtgggtgggcagctggcacctccccttggcagctcttaaccttctggtctccatcctcccttctctgcctccctccccacactgcaggtttgccacaagcgatttagcagcaccagcaatctcaagacccacctgcgactccactccggagagaaaccttaccagtgcaaggtgtgccccgccaagttcacgcagtttgtgcacctgaaactccacaagcgcctacacacgcgggagcggccccacaagtgcgcccactgccacaagagctacatccatttctgcagcctcaaggtccacctgaaggggcactgtcctgtggccccggccactgggctgcctctggaggacctggccagaatcaacgaagagattgagaagtttgacatcagcgacaatgccgaccggctggaggacatggaggacaacatcgacatgacctctgtggtggaaaacgagattctggccgtggtcagaaaagagaaggaagaaactggcctgaaagcgtctttgcaaagaaacctgggaaatggactgctctcagggtataacctctatgagtcaacagagccgtccctcctgaagttgcctcacagcaacccactacctctgggacctgtaaaggtcaaagaagaaacagtcgaacctatggatccttaagattttcagaaaacaaaaggtgttttgtcttgtttcttaacttacgacttggcgagtcagggtgcctgtcgcaagcgcttgtacataattccaattctgcaaagctctccctgacggcagatggtttccctcacctctctggaattaaagaaggaaccccaaagttactgaaatctcagggcataaatgaggcaaagacaatatatatacctattatatatacttatttacaccccatctatatatttgaacctgttgtattttgaatatttgtgtgaatatgtttgcatagcctccccattgctaagactattgcctagccataattattttttcaatgataatccttcataatttattatacagtttatcattcaaaaagcaataattaaaaaaagtttacaatgactggaagaattccttgtaatttgagttaagtgttatatttttgtctggtggccattctttgtagataatttctgcacatctgttttaagtatcttaagatttaataaacagatacattacttcaagtcaacctccctctataataatggtttgaaagtgaggtttgagtattgccaaagttaggcagttgatgtgttcattcataggattatattatttgaacagccttgtatcatttgaacataatttgggggtatgtttgcagaattaaccagtaataggtggaagaaataaaaaccttgtatgtttctgtagagagttcagcattcctgcccccaatcacagatttaccagaaaggtgataaggcgttgccagtctgtctccctcttcaaaaaaacagggttgtcccatccccaaagtcatgtgaccatttgcagtggccatgagactttagcatcccaatgtattatctgaaaatgtgaagaagacaaatgccatgtttaaaaccactgcaaaatgtttccaaagcacaggtggttttgtatgggtgaggtctgggggcatgagtccaggtgtttttgttgttggtcttttgttattacgtcagaattgcacaagcatggtgctccaccaggaaggatttgagttagataggctcaggccacactttaaaaaccaaaagccagaaaacgggtattctcgttgtcttagggtcaaagcgggtaatgaacattcctgtccccaacacatcagttgtatttgttttttctgtgcaactcaagacttttcctcagtatttgtgtttttacattttatggttaatttaattgaagaagaaagggcattgcaaagttgttcaacaacaattacctcattgagtgtgtccagtagtgcaggaagtgatggcatctttaatgatttgctactcaagaggagagagcacgtgtgcaccagagagatggaatgcatcccattctgcctcgtcctctgctaagcccaaagataacacgttggcattcaaggtgtagcggacaatgatgtatatttataaatctatttataccactataccatgtatatagaatatatttataaccacttaaaattgtgagccaaaacatgtaaaagatccttcttttcctaatggcaaaaaaaaaaaaaaaaaaatcaaaccctctctgactctttgcttaattagcactcgatgacctcacaattacattggtgagcttgggcacccccttggtattataagagatcctaaaattttggtgcaaaggtggggaccgcataacaaccagggagaaagagacataccttttttaactattaaggacaatctaagatggcttttttttttttttttttgtcacattctgatgtggtcacacccaagtcccagaaatagaaatcccatcaaccactgtaacttttctctcttcctctccttccttcttaaataactgatggatcactaatgaatctggtttatatattcagcattttggtctgtggcaactagtatcagcctacagaagagaacaacaaatgtaggataatccagggaaacctaagagccttactgatctgttcctttaaataatgaaactgacagttttttttaatattttttttaacagtgtttgacaaacagtccttgattataagtaaaccaaagcatcatactgacactgacatcaaatattttctattccccatcactcatttgttctcttttttccctctcatgctttctcattagtggaaatttttactgagacctgcacagtggcttgagaccccgtaattctctaccatctgactttccctctgaggcctcttacatgtgaatattgagcccacaatcaagagtggttttgtttttttctttcttctactcaaaactgaccaaagttactggctttttactttgctagaacaaactatcttatgtttacgtactggtttacattgttatttatgtgcaaattgtcaaaatgtaaattaaatataaatgttgatgcttta

SEQ ID NO: 12 - protein, 828 aa, Bos taurus
MLDICLEKRVGTTLAAPKCSSSAVKVPGLAEGTEGTMKMDMEDADMTLWTEAEFEEKCTYIVNDHPWDSGVEGGTSVQAEASLPRNLLFKYATNSKEITGVVSKEYIPKGTRFGPLIGEIYTSDAVPKNANRKYFWRIYSRGELHHFIDGFNEEKSNWLRYVNPAHTAREQNLAACQNGMNIYFYTIKPIPANQELLVWYCRDFAERLHYPYSGELTMMNLTQTQSRPKQQSTEKHELCPKSVPKREYSVKEILKLDSHPSKGKDLYRSNISPLTSEKDAEDFRKNGSPEMPFYPRVVYPIRAPLPEDFLKAPLGCYGMERPPYITHSPISSSTTPSPSARSSPDRSLQSCSPHSSPGNTVSPRAPGPQEARDSYAYLNAPYGAAAEGLGSLAGYGPPTHLPPAFIPSYNAHYPKFLLPPYGMNCNGLGAAVSNINGLNSFGLFPRLYPVYSSLLGGGGLPPPVLASASLPSSLPSEGARRLLQPEHPREVLVPAPHSAFSLPGAAASLKDKACTPTSGSPTAGTAATAEHVVQPKATSAAAAAPGGEEAVNLIKNKRNMTGYKTLPYPLKKQNGKIKYECNVCAKTFGQLSNLKVHLRVHSGERPFKCQTCNKGFTQLAHLQKHYLVHTGEKPHECQVCHKRFSSTSNLKTHLRLHSGEKPYQCKVCPAKFTQFVHLKLHKRLHTRERPHKCAHCHKSYIHFCSLKVHLKGHCPVAPATGLPLEDLARINEEIEKFDISDNADRLEDMEDNIDMTSVVENEILAVVRKEKEETGLKASLQRNLGNGLLSGYNLYESTEPSLLKLPHSNPLPLGPVKVKEETVEPMDP

SEQ ID NO: 13 - DNA, 18870 bp, Mus musculus
aggccaatcagctgtcagagctcatgataaatcgcaatgcattattgataataataattactgggacatgcgcgtttcggccgaagggggctaaaatttcccaactccaggaattggtggcggagagggggcaagtcaccagggctcttcccggcgccccaatgcgcgcaccatgtcgaggcgcaagcaggcgaagccccagcacatcaactgggaggagggccagggcgagcagcctcagcagctaccgagccccgacctcgccgaggcgctggcggcggaggaacccggtgagtgcggctgcggccacgtccgtgcgcccgactgtccgtgcgtcccgggagggcgctcctagcactgccgcgcgtccctcgagggcgcgggttccgggagccgattctggaatggggattccggactctgttccaggaaaggagagatgcggagggagggagcctcaatcccccacctcggagggagcctcaacccgcccacccctttgcaaatccccctagttttctccctcttattgtaaagttgattccacattctgcctctccctccaacttctctctcctcgtccacagtcccataattggtttccctcctttggatacataagcacccacctacgccggtaacttgggcttccttcaccccctctctagtggcgccgcttttaaaagaaagagacccccaagtctccccaccctctctactaccctcttgggggcccctgggggaggggcgcacctctgggggaccccccgaggagggcgatctgttgcacgcgcccctcccaggccgagtggggggagggggcgcgacctctccccacccccaggccggggtacgggccacccgcacagcgcagagggcgggggaggctgttgggcttagttccctttcggaggaagggaacttttatttttttgtaattttagatattttgtttacctttttttttctttccgcctttcccgggggctacggcgcctgctgccggtcctcgccctaacctttcggggcctgacctccagccatctttgatttccgactatctaaaaataaccgcggccagcgggagggtgcgggccggggcccgggcagcgggtgcatggtcaccccctctggggcgcacccccgctcctttatttatttttttgcacggatcccccgggcggcactgctcagcacacgcccgggaggtgaaaggggagaggtcgggttgcggctgacccggcctgagcctccacggagttcaggacctcagcgcggccgggagctgcgggcgagcccctcgtccctgcccgccgtgctgtcgccgaagaaaccgggaacgttgggaggagggagtccccctgggcctcccgctcgattccagctctccgcggatggtgggcggtgtgcggactctgcgcgctctgcttgggcgctcctgttttccccggagtgggatcctacttttcccaaacttaacgagtttatcaaagttcagtgaccttctacctcattgtatcccccccccctgccccccagggcaactggaaggtcattgcttgttcgagggggcggatgtgagttttggggcgttggagcatcccacatcatagggccgggcagctgggatggactctttgtgccttggcccggggagctaggggtgggggtgcagatcatggagaggctgggtcgcttggtccacctggaacaaaagggttaaccctcagcccgcctgcttcctctggagaggaggggcgagctctcggccctgacccctcccctggtcctgcgatgacctcccttccccctccatttggggtgagcgcatactagtgttttttgttttgtttttttctcctatttagctggtggtggggactctgggggtgggcggcatggagaggtggcttgctatagaagggcttccgaaatctccgctggctggagtcgtagttaacctggctgcaccctgaggccgctgggcgcgcgctgccacccagccttgggaagcgagttttctgcggatcactcgcggtcggagcccggcctctggcgtgcgggcgccctctggagaccggccatgtgcggactgcgacacacacctggtgagtgaggttagctaggccggagacccgcacacgcgtgatctctgtggggtccccatcttctgcatcaacatcagtgtttgggaatcttctccaagagttcttaaaatgtgtttgtagggggacctcgattgtggttttgggaagaggttttttgtttttgttttaaaatttctttaatgcctgcattttgggatcacccttagtttagataaatcttttggaagcttttggatccctcttggtcggtctgtaggagaatgcaggtttttttttttttttttttgagcaaggcaaatgaaatccgggcaataattagcagatcaaaaaatccgcaggtggtcaaggagaaggggcttacagtacttaaaggaaaattagcattttctcaaaagggttccaaatgccctttgtgctaaactggattacaaccttcagctattacgattcccaggtttttagtaatttagcgctcctcgccatccttcatcgacctgcctgtgcctggcttagttaaggtttcaagctaattcagtcttcccccaaaagggggagggggcttcttttttattcatttaattgcatgtaaaatgtgctccctaaccctcggaggttctccactgccagtaaacgatactttgtcattggtgatggggattaaggggatttcagtttaagtaggggaccgggagccgttttgggggagctgaggcatggttatttttgaatctcctccttttggatgtaaaatgtcaaatgagaatttggggaaaagaattttggcaggattcagtacgaggaagctcggcgttgcattctgggtgtaaccttgcctaggtggactagtgtacccccacttattcacccagctttttgggtccttgtgtacagtggcagtgaaaaagttttctatagactccttgcatgttgaggtaatttcatccacggaatgacagttttcactggaacctgctatgtggcaggctccagcctgggacctcgaaggacctcaccgttaattctcacaacctgaagtagttttggtatttcgctcccttgaataaaggctcccgggtggcaagggtcgcccagtggttcccctcccacttgactttagccttcttgaatccatggggtgtttgttgttggttctagagcaagggggatgtactcattagtaagggacagcctagccatggtgcttgaagctgctttggtttggtgacacccccccccccagtctgtctgtgtagtaaccatgacagctttctaacctgtcccagccttgtcacgctcttgtctttgcctctgaagctgagattggaggaatgtgccgctaaatccagtgcccatttgatttttcaaattgccttttagaaactgtgggtgatgagacttcccagcaagcaactcaagagctaacgtcatttgggtttctttcttggggttacgtgattttgaaaaagaaaaaaaaaaaaaagccaaaccaaataggagatgaatttgggaggttaccgtaatcactctaatctctacttttttaacaaacacagctaacacacacaggttaaagccttggttggtgcaggctctagacagccttgtttcatcccagggagagacctctgatctctcttggggttggcaagctcgttcagttgaggcaagtatcccttactcttatgtaaggcatattttatataaagcgtcttctgaccctcctacccttaaaaacttgaattattgattgcgtgtgctgccaccctgtgagtgagcattcagaggacgggagggctgatctatctggggtcattcattcattagctgtggccagcgtcttaccctttcaaaaccttttccacaggcccctgaagtttaatccgtgattgttttttgatttctgcaattcttgattaagtagaaacttaatttcaagtcaaatttgacctctctatgtagattttaaggcttgctgtttgaaactggttttaaaaataaagctcctacagctggatctgtaatatataatcccttttgttttttggtaaggatttatcctggaggtagggcagggtctaggatactgtgtgctttaggtaaactgttcattgtctttctttaatacaggaccagtaacagataagcccaaggcaccaggcttttatcaagatacacagatttcaattttttttttttgtttctgtttttagctgttttgagtgtcttctgcctcctggctgattagctttcttcctatacaatagtaagcgcattttctattcatctgggtgagattgaatcgaaagacccctgctggctttactgcattcttcctacttactggataactagatgctgaagagataacattcctaaaattcggggtgggggatggaagccacgcttgctggagttatccctgtggactttgccttccttcccttcaggttaatttaagcatagccagcaattgttcctaacagggtcctctttctccttggcaaatactccgtcccattatttgccgacggtggtatggacgaggtagttttttactgcctaagcaaacatcggctacagttttaagtgggatgcctggtgcagcggtcaggctgcagggggagaggcttcggggcttgtgtatacagtgaaggcggttggcatcccggtagtaaatcactctgagctggtgtatccttcgggagcagagatgcttaaccttttttgtgccatagctcccttctcagctgagtgctgagcggacgcagggtaccagggaaagcaggtacagtgatgtatgaacaatgatcagaaacgaaaaaattcagccctcttgtctttccctttgcaagctctgggaaatgactaagagggccctgggctggctattgtttctggctgtttctcccctaaacaatgcagcctgaaaactatttacatagtgtttgcattgcatgtgggcatgctaaatcccggagattaaagtttgggagttggagatactgctcagtgggagagctacacccttagctggtgtgagggcttgggctctataccccatgtgggggtggggggcaaaccagagggtgtgccagacaggatcccttagagtctccaactttgtctgctctccacctcctttaaaatatcaggggaatattatagtaatgttaatattctgttaataaaatgacaggttagggtggcacggtgtggttggagaactctttgacttttatttatttagttttttttttttttcttttttgaggtagggattctctatgttattctggctgtctgtgacatgctatggctgtctgtggcatgctgtgttctggccttttaaagacagacagggatgtggtccagttggtagagtgctggcccagcgtgtatgaagcaatatttgcagccctgcaggaaacttaaactggatctggtgttgcttgcatttatttggagcattagggagctggaagctggagatgagcggtacaaggccatctggatgccctggtaggaaggtggacagacttaactaggtaggcatcaggtaaaactgggcattggtagtttccagagtgggcgagaaggaagggcggagggatggagaggctgacgtcactggaagcacttctgatccagttggtaccggtttagagggatcttgagggtcccggaaacagaggcaagctagtctctggattcgaggccagcctggtataccgggtgatttacatacagggtagccagggctacacagaaatcctgtctcaatcaaacagaaaaggaccttcccaaagtacccaccccgctttctatcccacttccctatagacattcatgtctgacacacccataccctgcccagcctgcttcctgcctttcaaaaattcctttctttccgaagaattgaggcaaagcctgaagtgctgttgggatattacaatcctggttgaggcatatgctcaacaagcttgaggctgccttgtgagatccgggccagcgtggcctgcgggaccctggttcagacatcagtaaagactcttgtgtggttcttttagagaaaacaaagttattttggggtggtttactgttttgttttatttacgtggaaacttggtagatcaagagctgttggtgattgttaattaatgtgggaattgtgtgcagccagttgctgaggtagacgagttggttttttttttttggtttttagagacagggtttctctgtgtagctctggccgtcctggagctcactttgtagaccaggctggcctcgaactcagaaatccgcctgcctctgcctcccgagtgctgggattacaggcgtgtgccaccacgcccagcctaattttttttccattttttattaggtatttagctcatttacatttccaatgctataccaaaagtcccccatacccacccaccccaattttttttaaagattcgtttatttattatatgtaagtacaccgtagctgtcttcagacactccagaagagggagtcagatcttgttacggatggttgtgagccaccatgtggttgctgggatccctgagccagccctgtttgttttatttttaaaagagaaaggggctggtgagatggctcagtgggtaagagtacccgactgctcttccaaaggtctggggttcaaatcccagcaaccacatggtggctcacaaccatccataacgagatctgatgccttcttctgttgtgtctgaagacagctacagtgtacttacatataataagtaaataaatcttaaaaaaaaaaagagagataaagggtttctcttagtatagccccagctgtcctggaactctctgtagaccaggctggccttgaactcagagatccacctgcctctgcttcctgaatgctgggattaaaggaagtgcgtgccacctcgcccgtcttatttgtatattttcttgttatgttcatgcctggttaatgtttgagatgtggaatctccttgaactagagtttcagttaagagcaaacatgtaggtgctaggaatcgaaccccggtcctctggaaggacagcaagtgaggagccgtggtacctgacccatgcctgctgtgttcgggagggtcctgaacgttgcagtatttggacaggatcagactctccatgtcaaggtagcccaggctggcctagaagttaagaacctctaggactgtcattacaggtagtcggcttacatcctaattttaaattttttatcgtgggtctcctgtatctgaggacacctcatatgtcaccaaggatggtctggaacttcttatcctctgcctggctgggtgctattattccaggagtgtacaatcacaagacttcactctgtgtcgaggatggaatacaggtgtatgcttcgcgctgcccaactcccagctctccgttgttgttgtgagagagagaagacgggcaagcagtgtcttctactggctttaatgtgtttcttgtttcatggtttcctatccagcaggattcccctcccccatcccctagacttactgttgagaaagaaaagggcattgtgttcataggacatgtgtgtgtactagggaaagacctagctcgggtcccagcatcccctcaccccccctcagtgaaagctgctgggtgatctacaaggctccagttggtcactgtggtgagggacttgtcacagcacgtcgacagttttttattagcttttgtgaatgagggtgtatatgggtgtgtgtgtgtgtgtgtgtatatatatatatatggatatgtgtgtatcatgtacatacacaggtaccaacaggacactagattccctggaactggaattatacatgcctctgtgtgggtgctgggagttgaacctgggtcctgtgcaagagcagccactactcccattcagtgaaccatctcgagcccccgataaacttttttttttttttttttttggtttttcgagacagggtttctctgtgtagtcctggctgtcctagaactcactctgtagaccaggctggccttgaactcagaaatccacctgcctctgcctcccaagtgctgggattaaaggcgtgcgccaccacgcccggcaaacttttgttttcttaaagatttattttatttattatacgtgagaacactgtagctgtttccagacactccagaagagggtgtcagatcttgttatggacggttgtaagccaccatgtggttgctgggatttgaactcagggccttcgggagagcagtcagtgctcctaactactgagccatctctccagccccctgataaactttaaaaagactaatttatttatttatttgagtacactgtagctgtctatagacacaccagaagagggcatcggatcccatgacagatggttgtgagcccctgcatggtggctaggaattaaactcaggatctctggaagagccatctcgccagatgatgaacatttttttttgttgttttttgtttcttttcgaggcacggtttctctgtgcagccccggctatcttggaactcactttgtagaccaggctggtctcgaacttagaaatctgcctgcctctgcctcccaagtgctgggattaaagatgagtgccaccacgcccggctgctgataaacaggtgcctgcagatgctcttcctatcccgtagtccaaaatcagcaacagttgagggttttattaaggctgcgctaggttgaacttggtggccacatcggtggtgcggtgaggctcgaggttgaatccagtcttccctgtcacgcatggattctgcacttgggaggatgaggcagggcagtgagtccttttcgatcagcctggccgtgtgagactcagaacacaacactgaaactcccacaggttgtcctgacgtccatatatggtatagcatgagcaagcacatccatatggccacagacttggtgaataataaagggaggaaggactcttgagtcctgagcttcagtttgtcgaagacatcgcgtttgcactgtcccaatgttgagacgaccaaacagaacagctctaacttggatcctctttgtttaacatgggacagcagtgaatgttgtagttgtagggtgtcggcctcccggaattgcttatctctactttgctctctctatatttatgtaaaagcttgtttttagagttcgatgccaggctctctccttgagagggcgtgaagtctgtctgcatctttgccagcctttgtcagtagcttttctcatggagacgtagctgtagaacgatccttgtccttagatttaacacccagtgtcccgtgttctgtactccaagtgatcgtgtaggtggtgctggggacttaactcagaaccgcctgcaagctgggccagccctccaccaactctagctgctaatggctggaacttgctcatctctggggttgggtgaggttctgatttattctttccatttcgcctgtgtcgtggtggagatcagtgtgatttggccctgtccattagtctgtgcaagccagcaccgaaggagacatagggattgatggggttaatttaacagctatctagtgggacgtagtgccacgtggctatctataatcctagctcctgggaggctggaggtaggattgctacaaagttcctatgtaaaatagctgtgtatctccgtattgctgtaacaaactactacaagttggcttaaacggtggtcgattgattttcatggatgtgaaatgtctggattgagtgactgactgggttcttcctcagggctcgggggagctgatagattcctgtggtttcagcagttcttggtgggggcccttgactccatctctgtcttgactcttggggccctgttctctgggactgtgactcacaggtcccaattcttcttcttggagtgatgcgaataaacacttaacattcgccaaaacccctgtccaatccaggcatgggaaaacaggctcttgtaatctcaggactctggaaatagaggtagggagggttaggagttcaaagccagcctctgctacaaagcaggtttgagactgcctgggctaagggagatcctaaaaaacgatccagatagttatgccagacaggcatggggctgcaggcttgctcgtgttatcctgttcggtcctataggctatatataggagacttagtgtcccttatacaatcctcctgagtcaggacatgtgctgatggggaattgattactgctggtcacttgacatcccttctcagggcatcctgctcacctttttctctcctttcacaggtgctccagtgaactcccctgggaactgcgatgaagcctcagaggactccataccggtgaagcggccccggcgggaggacactcacatctgcaacaaatgctgtgccgagttctttagtctctctgaattcatggaacacaagaaaagttgcactaaaacccctcctgtcctcatcatgaatgacagcgaggggccagtgccttcagaggacttttccagagctgccctgagccaccagctgggcagcccaagcaataaagacagtctccaggagaacggcagcagctcgggggacttgaagaagctgggcacggactccatcctgtacttgaagacagaggctacccagccatccacaccccaggacataagctatttacccaaaggcaaagtagccaacaccaatgtgactctgcaggcgctccgcggcaccaaggtggccgtgaaccaacggggtgcagaggcacccatggcgcccatgcctgctgcccaaggcatcccttgggtcctggagcagatcctgtgcctgcagcagcagcaactccagcaaatccagcttacggaacagattcgcgtccaggtgaacatgtgggcagcgcacgcgctccactctggagtggcgggggccgacacgctgaaggccttaagcagccatgtgtctcagcaagtgtccgtgtcccagcaggtgtcggctgccgtggccctgctcagccagaaagcctcaaacccagctctgtcgctcgatgccttgaaacaagccaagctacctcatgccagcgtcccctccgcagccagcccgttgtcctcggggttaacgtccttcaccttgaagcctgacgggacacgggttctccccaacttcgtgtctcgccttcccagtgccctgctacctcagactccgggctctgtgctcctgcagagtcccttctccgctgtgacgctcgaccagtccaagaaaggaaaggggaaaccccagaacctctccgcctctgcctcggtgttagatgtcaaggccaaggacgaagtcgtcctcggtaagcacaagtgtaggtactgtcccaaggttttcgggacagatagctcccttcagattcaccttcgctcccacaccggagagagaccttacgtgtgccctatctgtggtcaccgcttcaccaccaagggcaatctcaaggtccacttacaacgacaccctgaggtgaaggcaaacccccagctgttggccgaattccaggacaaaggggcagtgagtgccgcttctcactatgcactccctgtccccgtccctgccgatgaatcgagtctctctgtagacgccgagcctgtcccggtcacgggaaccccttctctagggctacctcaaaagctcacgtcagggcctaattccagggacctcatgggtggctccttgcccaatgacatgcagccagggccttctccagaaagtgaggcgggccttccactccttggggtggggatgatacataatcccccaaaggctgggggcttccagggcactggggccccagagtcagggtccgagaccctgaaattgcagcaactagtggagaacatagacaaggccactactgaccccaacgagtgtctcatttgtcatcgggtcctcagctgtcagagttccctgaagatgcattaccgtacccacacaggggagagaccattccagtgcaagatctgtggccgggccttctccaccaaaggcaacctgaagacacaccttggggttcaccgaaccaacacgaccgtaaagacccaacattcgtgccccatctgccagaagaaattcaccaacgccgtcatgttacagcagcatatccggatgcacatgggtggccagatccccaacacccctctgccagagagtccctgtgacttcacggctcccgagcccgtggccgtcagtgagaatggcagtgccagcggggtctgccaggacgacgcagcagaagggatggaagccgaggaggtctgttctcaggatgttcccagtggcccctcaactgtctctctgccggttcccagtgcccacctggcatcgccctctctgggcttctctgtgttggcctccctggatacgcaggggaaaggggctcttccggcgctggccctgcagaggcagagcagtcgagaaaacagctccctggagggcggtgacactggtccagccaatgactcttccttgctcgtgggtgaccaggagtgtcagagccgaagcccagatgccacggagaccatgtgctaccaggcagtgtcacctgccaatagccaagccggaagtgtcaagtcccggtctcccgagggtcacaaggccgagggcgtggagagctgccgcgttgacaccgaaggtgatgaggctttggatttcctttaaggtcccttttgggctcaaggtcaccagaaaaagaacctaggttgaacttgacagtgtgacctgaagcagcttctttaagggcaattagctgttctgttctgggtctcgggatctaataaccgcctttatcctgacacccagtaggctggtagcgtggttcctagaggttgagtgtgcccaatatgaaatgttggttttgttttgattttttttttctttgaccccatggggacatgggtgacggtagccatatcactgtgttcagggaagcaggccccatttggactgtgaaatcaagccatatttgcctgatttagaggtctggctatgaaacgagttcagatatgagaggtactgcctgccttattgtagatgccttagctgaggggtcccttgatcctaactagaacccaagttcctaggtgggacttaaaggtgactttcttcattgtgctgccaggatttcaaccaagggtgtctctcctggttgacatccccgaccttccatcctgtttttttttttttgtttgtttgttttttttgttttgtttgtttttaagatagggtctcatcactgtgttgtagactaggatggctttgaacttgagtagtttgcctcgacctctcaagtgttggggttgcagtcatgcactcccggatcaggctttttcaagggttggcaggaggataccagctggggttctttcttcagatcctcctgcctcgccctctcacgtagctgcaatgataagcccagaccttaaaggtgatatcttacgttgagtcttaggtgctatctgtacacatatttctatgttacctatactttaaaccataaaaaacgtccattttccaaagtgtttgagcctctgttttcttttcatgaagaactctggggcggggctagcaattgagcccttgtctcccatgcatggtgatctgagttaagttctccagaacacatgtgcaaaggccatgtgtgctggggtgtgcttgtacctggtgttggctgatgggagacaagctgatagcttagacccctgtcgatattctagactcaggagagagcctgtctcaaagaggtgggtgataccagaaaaacaacacccaaaggctgcccttcatgtacacacacacacacacacacacacacgcgcgcgagcgcgcacatacaagaaggtcagaggaagctgctattgaaaaataatttctgtaaggaaaatctagcaggcaactgcagagcgtttgtcttattatttacttatttttttggctttttgagacagggtttctctgtgtagccctggctgttctggaactcactttgtagaccaggctggccttgaactcagaaatctgcctgcctctgcctccgcctcccaagtcctgggattaaaggcgtgcaccaccaccacccagctgattcttaccatttagctaacccaactcacttttaaaataaaagaaacgcggagctgggcatggtggcacacgcctttaatcccagcacttgggaggcagaggcaggtgaatttctgaggccagcctggtctacaaagtgagttccaggacagctagggctatacagagaaaccctgtctcagaaaaaacaaaaaaccaaaaaacaacaacaaaaagttaaaaatctctccctttctccacattaggtcgtaccagcctccctccaacatttatccgagcacagcccacctttgtcaaagttgaagtgcctggcacctttgtgggaccccccagcatgccctcgggtatgccgcctttgctagcatcgcagccgcagccacgccgccaggccaagcagcactgctgcacacggtgtggaaagaacttctcgtctgccagtgccctgcagatccacgagcgaacacacacgggagagaagcctttcgtgtgtaacatatgcgggcgggccttcaccacgaaaggcaacctgaaggtgggttccgacgggcgttggtgtgtgacgtctgtgtgcacagagaacatccattggttcatgtgtctcagatactataaacctagcaataccagaggcagaagcgggggtcctctgagttcgaggccagcttggtgtacatagtaagactaggttattctggcacttgcactgtagaccaggctggcctctcagatcttcctgcctctgcctgtaagcggtaaaagtcttgctttgtgtgaaaactcctaatccttctgactgggtgagccatcatacctgtgcgctgtctctctgtctgtctgtctgtctctgtctttctctctatatacatatatatgtatgtatgtgtgtatatgtatatatatatatatatatatatatacatatacatatatacacacacacatcagagccttgtactcagggaggttagaagacgattctcaggcaggcactaaagtaaattgtgtatgcgctagctaccgtgtaggttctgcgagtcaaacctcaggacctgtaagagcaatgagtgatcccaaccactaccccgtctttatccccaagttgtgatgctcttgaacttggcgacatataaaactgttgtagtcacatgtgagtcactcggaatcccagtagtctcggggggggttgcagtcgggggcctaggtcgacatctcagggttgaatgcgttgctcttcttgcagaagacctgagctcaattctcatctcctatgtgggacggctcacaccacttggtgttggggatacgctggtttcatctcagcattaccagaaaatccatagactgcacgttggtgccgggtgaagctgggctggcagtgcctgtctaaagctcatctctgtcaccctctaatccagccttgctcgtctcacttcttgggaggtgaaggcagtggggcaagggagagccagtattgaatgtcagtctcagctaggaaagattcttgtctcttcgtttgtcttgttttttgtttgtatggtttctgacacagggtttttctgtgtagccctggctttcctgtaactggctctggctctcttagactaggctggcctctttaaaaaaaaaaaaaaaaaaaaaaaagttggccagaacatcaggctaggaactgaaattgccttaatttaggactaaaaaaacttaattagtccactggccctgcctgactgtcgagtgcttttcttgttgaggggtctgagcaggtgaggtgccttggtttctgcaggcagtggatgctggggtcagaactcctgcttacaggtatccattgccaggcctttccagcagctgctagcctcagcttaggatgctagagacgacctggagaggatgtgttgccaatgcgttgcccgggagcctgatcctgtagaggcttttgaatgtcagccaggggcgggtgagatagctcagtggttaagagtgcatacatactgctgcagaggggctggtccattcctagcacccatgcccggtggtttagcaactgccagtaagctcaactttgggctcggggtggggtgggggaacctgatgtctctggcctccgtgtacatgtacgcttacaacacgtgcgtgtgcacactcaaacacacataatttaaaagaataaaggaagaaaatttatttttaattgagacagtttctctgtgtggccctggctgtcctggaactccttctgtagcccaggctggcctcgaactcagagatcacctgtctctgcctcccgagtgctgggattaaaggtgtcagccgggcagtggtacccacacacaagcatgctctcaactgtatagatactacctgcatttattattttctggcttactgatacaagatctgactgtagcccaggctgccccttccaccacactctgaccactggtgtgaacatgaagccagctgacttgggcttgcctacaagcagggggaccatctgatgaaaccctctctctgctgtcccccaacaggtacactacatgactcatggggccaacaataactccgcccgccggggaaggaagctggccatagagaaccccatggccgcgctgagtgctgagggaaagagagcgcccgaggtgttttccaaggagctcctgtcccccgcggtgagtgtggaccccgcctcctggaaccagtacaccagcgtcctgaatgggggtctggccatgaagaccaacgagatctccgtgatccagagcggaggcatccccacgctgcctgtgtcgctgggggccagctctgtggtgagcaatggcacgatttccaagcttgacggctctcagaccggtgtgagcatgcccatgagcgggaacggagaaaagctcgctgttcccgacggcatggccaaacaccagttccctcacttcctggaggaaaataagattgctgtcagctaaggaggaagaggagaggagtcttctgcagggagattctagaatctgctttattctttagttttttgtttttttttttttttcttaacccacctcctttttttattttcttcctcttcctgatatgcaagtgatgtggcttgtgaccatagccttgggcaatcctacaatcacgagagttgctatgctgctttccaaaaaaaagatgaaaaatggaggaaaagtgaaaaacaacaaaaacaaaccaaaaaaaaaaatgataaaaagccagactttttgtttttgtttttaaaccattttggaaagaagcgggttttgaaaaatagttctgttaatttgggacaaattatattctagaagctttgtgtgacctcatggctgtttccaaagactgtcatcaacctgtttcgaagtgaaacagttgggactcattggaccacagtggaagtgacaactccttaacccagtcctggggtgagggtgtggtgtccttctgtggtgactaatgcgggtaaatgtagggacctggttttatgcctcccgaccctgtcttcatcctctgtttttttttttttgtttttgattttgttttttttaaatgtactttaagagaaaaggagaagagaatgccagaaaactaagatggttcaattaatccacttccttcagccttatgcccttggataggacatcctccatacaccggccatggtccctcggaaagcccacaatttctcctgctgcttccttaaatatttcagagcccttagagtatgcctccaacccctgctaccccatctcccacaaaccaccttcccaggccccagggtggggacaggcaccagagtgggcacctcaggagattttctgaggttgtcttcagtgcccgctacattggaaaactgcctgtttcctagtggcaccaggagggttgcctcgactccacgtgcatgctatcctttctgtttatttcggttattccaagacccaaagaccttcacacccacccaccctccgccgcctgccgtcatgaaggttatagagttgagaccagcaagtcttggatgtgagggctttaatttatctacctcaattatctttatttttgtagccaaaagtcttctctattttgctatttttgcgaccacccaagtattgccaggtcttaaacctaagagttcttatactggtaagaaggccccgaagctcaagaagtcttcgtggttggttctgtgggttttgtttttgtttttaattacatttttgttcgtgtaataattctgaacagctgttgtaacagtgttccaatggtttagtgaggtaggagagatttctccagtctctgggtagaaaattctgcctgccgtgttgaatgcccttgccaaatgaagatggagactctcgcccagtgtttcctctgacttgttgcacctgattttaggatccaaaacttgttttgttgttacttctttctttttctctttctttttttcgccaagtcgtgcctttccttctgggattgtaagtgaaccccgtgatcaagtgttcaccggttcacctgtttacactgtgaagtgggtatcttacggagaacacaccagccttggttttctcacgccccgtgaatgaatgtgtacgccacagttttacctgctgatactgtaaggtctgaaaataaagtgaatgttttccctccatga

SEQ ID NO: 14 - protein, 1067 aa, Mus musculus
MSRRKQAKPQHINWEEGQGEQPQQLPSPDLAEALAAEEPGAPVNSPGNCDEASEDSIPVKRPRREDTHICNKCCAEFFSLSEFMEHKKSCTKTPPVLIMNDSEGPVPSEDFSRAALSHQLGSPSNKDSLQENGSSSGDLKKLGTDSILYLKTEATQPSTPQDISYLPKGKVANTNVTLQALRGTKVAVNQRGAEAPMAPMPAAQGIPWVLEQILCLQQQQLQQIQLTEQIRVQVNMWAAHALHSGVAGADTLKALSSHVSQQVSVSQQVSAAVALLSQKASNPALSLDALKQAKLPHASVPSAASPLSSGLTSFTLKPDGTRVLPNFVSRLPSALLPQTPGSVLLQSPFSAVTLDQSKKGKGKPQNLSASASVLDVKAKDEVVLGKHKCRYCPKVFGTDSSLQIHLRSHTGERPYVCPICGHRFTTKGNLKVHLQRHPEVKANPQLLAEFQDKGAVSAASHYALPVPVPADESSLSVDAEPVPVTGTPSLGLPQKLTSGPNSRDLMGGSLPNDMQPGPSPESEAGLPLLGVGMIHNPPKAGGFQGTGAPESGSETLKLQQLVENIDKATTDPNECLICHRVLSCQSSLKMHYRTHTGERPFQCKICGRAFSTKGNLKTHLGVHRTNTTVKTQHSCPICQKKFTNAVMLQQHIRMHMGGQIPNTPLPESPCDFTAPEPVAVSENGSASGVCQDDAAEGMEAEEVCSQDVPSGPSTVSLPVPSAHLASPSLGFSVLASLDTQGKGALPALALQRQSSRENSSLEGGDTGPANDSSLLVGDQECQSRSPDATETMCYQAVSPANSQAGSVKSRSPEGHKAEGVESCRVDTEGRTSLPPTFIRAQPTFVKVEVPGTFVGPPSMPSGMPPLLASQPQPRRQAKQHCCTRCGKNFSSASALQIHERTHTGEKPFVCNICGRAFTTKGNLKVHYMTHGANNNSARRGRKLAIENPMAALSAEGKRAPEVFSKELLSPAVSVDPASWNQYTSVLNGGLAMKTNEISVIQSGGIPTLPVSLGASSVVSNGTISKLDGSQTGVSMPMSGNGEKLAVPDGMAKHQFPHFLEENKIAVS

SEQ ID NO: 15 - DNA, 20414 bp, Sus scrofa
atgtcgaggcgcaagcaggcgaaaccccaacacatcaactcggaggaggaccagggcgagcagcagccgcagcagcccgccgcggagtttgcagatgcggccccatcggctccggtggccggggagccgggtgagtggggctgggggcgcacgccggcgcgggcagtttccccgacgctcgcgggaccctcgaaggcgcgggctttgggggagccagaggctcctagcgcagattctggagccaagatctgaggactcagttccagggaggagcggcagcaccattccccacccccgcccttgttaattttacgcttttatcgcttctcccctcttgtgtaagtttcacccccaggtctctctattcttattgtaaaactgacccccagcctctcctccgtccctctcattcctggaaggttcgcttctccttgtcctctgcccctctcttaattggttccactcccctcactggtaacctcccccccccacttgtaaccgaggctcccctcctccctccctggcgccgcttttaaaagaaagaccccgggggtccccactctttccttcacccattgggggcttttccaggaagctggggaaggggcgcacccttggaagactcctgggggagggcgatctgttgcacgcgcccctcccgggacaagaggggggagggggcgcgacctctccccacccgctggagctggggtgcgggccacccgcgctgcggagggcattggagggcccgaggaggtagaggagaagggcacagtatttccctttaaaaaaaaatttttttttttttttggttttcctcttttctcccggggctacgtcgcctgccgatcttcgccctaacctttcggggcctgacctccagccatctttgatttccgacttcctaaaaataaccgcggcccgcgggaggggtgcgggccccaggggcgggggtcgcgggcgcacgggcagccccgctggggtgcacgggtctggcgttttgcgttgcttttctagggcgcccggctttccaaaagcgcgcggcggggccagaggggagaggtcgggccagggctgggcggtcgcggccagggcgagctcccggggctgacccggcccacgcttccgagccgcgcgccccggggtcgggaggagttcgggacccctagactggtcgggagcagccgagcaaactcctctcttcctagtcatttcacccaaggggctttaggagcgagtcgatttcccactatctcccctccgtcccggcccgccaaattgtcgcctgataagtttttagcgtacgcgtggggggagggggcgttttaacctcctcttgggccttgttgatgacttccctcgccgcctgctttctaatttcccaaccggtgatgaggtgtgcgcggcaaccccaggcaatccgagccacaactcctttggggagacggtcgctacttttttgctaccgtaccctttatttcgcggagggaatgtagcaagtttccttaattttaaataagataatgtatcatccttatttccttccaaataacattttcttcacggcaaattaaagagatcggcctgaccgagggggcggctgtgcgttttggggcgtccgatggtcagggcagcgcgcacccgaggtcggaggagtggactctctttgtgccttgggagggggtggggggagaatggagaggcttcgctgcctggcccacctggaacaaaagggttaaccctccgcccgcctgcttcctcccgagaggaggggcgagctcctggctctgacccctcccctggtcctgctctgacctccccttccccctaccccctacattttgggtgagcgcacttaagtggggcttttggttgtggttggcacttaaggggagcttgttacgggggttgcttcttaagttaacgcaggctggagtttgcagttagccggagctggttgggatctcggcggggcagtgcgctccctccgcgatttgggagggggagttgctattgatcgtttggcttggagtggatggctgagttgcgcgcgggcgccccctggagacccagcctggaacctcgcccttgctgagaggcgggtccccatgcaggtaccggctcacacctgatggatgagaatgggacgggctggggcagggggtcggagagccctggctagggatgggagcgcctggggactttaatctgttgcttgagctatccctggctctgccaggtattctttgctatatctttggagttcttggaaagaattcttccggtcctagaatgtgtttgcagaacccccagttgccaccatgggacagaaggtagttttcccaaacaagcagtgaatgcattttgcatttgagcagcctctgtgtgtgtgtgtgtgtgtgtgtgtgtgattttaaaaatccagtttagcctggtcttaaaatttttgcaaagccaattagagacccacttgtaaagaatgcacgttttgagagaggaaaatgaagtccagcgatcaattagcagatcagaaaaatctgcaggtggtcaggagactcatgcttcgcagaggaaaattagcattttctcaaaagagttcaaatgccttttgtgccaaactggattacaaccatcaatgattaagattcccaaatttcaaataaactgcctagccccagtttctaaactgcaatgacctacactggcagtaaggattctgagaatagggcacttgggagctcttgttttaattgagggagaggaaagtcgtgatagtagcattagttagtgttgcaggctgactttctgtttccgagttcctgaaagaggggctgcaacttgcccacagccccttttgttccattaaaaagaaattgcacaagtcaatgatagttgcttattcaagcctctgctgccttcctcaaggtggtgggtgggggagccatcttgggaggccgggatagagttattgcttcctctttttaaatgaagttaagtcttttgtaaggttttagagtgagatgtgcattccagtctgattgtgtgactttcagctgtgtaaccttgagaacggctctatttttgagcttttgggttctctttctacactatggagatgaagggtcctgtttagatcgtttgaaggctcactgtgttggaaatgtgatcagtaattaattttgctcaaaataacaatgttttggttttgattgtgtcaagatggtgctgaactgccaagtgaagtaattctgcagttttatctgccgcctgctctgtgctggggacctcgggtacataatccataattctcattttagagtaaacttcagctcctggttgcggtgacttgcccagggttgccttgtccggtttgatttgagcctggctctaaagccaagacgctgtggtgtttatcaaggttttagaggaattggttatggaatgggatgttctatcagttgctttgatgagggacccaggggtgctgagtgtggttggttttgagtttgatctctccttccttttaatttttgagaggtgcctttgcaagctttagatgaagaggtcccggggaataagtaggaaataaaagcaaagaattggtgtttggtgatttgggctttgctgccctgggaaaaataatgggaagaggtttaagaagttccctcttcatcattcttaacctgttgtgctttcagttacttgaaaaagcatctacctcttttaaaaagcctctaagtccagacgagaaccgcatcttccctaatcacccccatccatttctttcccaaattttgagtctgtgccagtctttgttctagggagctctggcgaaggaggccgcaaaagctgccgcctacgtggagtttacaaatggcttataagatgagctccagttgaggcaaaatgggacatatctctagagcgtaaatagcagagctcacacaccttggtgcaaagaaacttgggttcttttccttgaatttgatccaagcctaattggaataacttttttgataccttaattaaggagaaacttaaaacagctcaaatttgccacctacaagttgctgaatgcaaatttaaaaccttcgaactggttcaggatggaagggcatctcaatttccttttgttttttggtgggcaattatcctggggtgggggtagggtagaagatactatgtcctttaggtaatctactcattgtagttcttttaatataggaatggaaaaaaaaaaaagataagcttgaggcataacgcttttctcgagatacacaggtttgttttttaagcatttccaccgcctctagaatttgattggcctctagcccaggagcctttcttcctatacaatagtaagagtattttctatccatttggcagtgattgaatctaagacccctgctgggtttactgcattcttccaacttattggataactagatgctgagagataacattcctaaaattcggagtgggggtggggtgcaaggatgggcgatctagttgctgtgtaatccctctgaactttgctttttcctttggggaagggttaacttaagcctaccgggcaattgttcataacagagtcctcttactctttggcaaatacgctttcagtgtttgccaggggtgatctggatgtagaagtactttttactgcaccagcaaacagagctcctgctgttttaagactcgagtgggatgttgccggtattgcggtattgcttcgaggctacagaagaggcgagtctgtgtatacagtgagggcaagctggtattcaggttgtaaatcactcttgggaactgctggatccttctggggcagggagcttaaccttttttgtgccatagtctccctccacagcatggattcaaatgcataaaaataaaatacacagtgacaccaaggaaataaattgcactgggatacagttagccaaaaaaaaatgaaaacctttgtgatgtggtaacgtgcttctttatgaacccaataaataagatcttagcagttaggtaaccagaatttccagtaatacaactgcattaagagcatatgaaaatacctgttttctgtcgatgatgtagacacaggctctgtggataccactggagcgtgcccccccccccccccgtttataatggcaagaaacgttaactttgagttcagcttcgtaacaaaaataaggttgccatttttttcctatcttgtgcatagaccctgctttaaagaatacctgctttagaacctgcattttcagtgaggagatgttatccttaagaccgatgaaaattgtttttttgggggggtaggggagcaaaaacgtttattgatgtggcagtggtttgtgaccttagaccatagtatataaatagatacacaatatatttgtgatattagcatttgggggggtgattaggaaaaaatgctttaaaagccttcatagataaaatgaaaaaagaaaaacgtgagaaaccgctttagaagaagcagttataaattagaacactgacttgagcctccttcttaaatgaatagtacttaacacactcccagctcttgtgttttccagccggcagtgtggcaccttgagtcagctatctccatacttcagtctccacatttgcaaattgggaaccaaggcacttacttatgtggctacaaagataagcgtgttaaggtgtaagagtctgaagcgtgtgctttgttgccgtttgtggagggtggtaggtagtccttttgccttggcccttccttacaaagcagaatgagcctttgtacataggctctttaatagatttcctgaagtaaaatggctgagatgagatgtgtaacatgctaattaaaaagaaaccacagtatgaaagtgtatacactttgcaagcttctcttccaccccaggcctgtgcaccaaaaagcagagaccagccacagggtctcttatttccaaagtttcccatgtacatatttaaatctttatccccaagcacaaatggaaacattatatatacatcctgttctctacatttttttcctcctcttggaataaatctagggcggctgtcctatagcgcaagcccgaaagatgtactttattttcgtaggctacaaagaggtcatcttttttctgtaccctgatttatttaatcagaactgcattgatggatcagaggacatccgtttttgtttagactgttggttaacacgagccctgtattcctggtatcacaaagtaaattcctcatgaggaaattgctaggtggaaggagaatgacacgaaaaggatgatggtggtggattgtgctctgcagaaattatatctcccatccaagtactaaccaggccggaccccacttagcttccgagactgggtgtcttcaggctggtatggtcatagtctgaagttgtatctgtttctatgttcctacctatagcctggatttctctctggagagaaacttttttaaaaagttccactctaaagttctcgacacataattaccagagttgcttttccggaaagactgcgtcacttaactgcccccccccacctgccaagcaccattacaaatcttgggaaaggtagcaaatggatactagcttaaggattctgggagttaacgaatattttaaactaggttctttgaaagatgatcgttttggagcaggagtgggactggaaggaagaaggtacctacctgctgactccgtgtcagcctcagaggtgtcctgacttacccctccaccccaccccttaagctttcctgtccctctggggtttctgtgggtggaaagatagttgcattcgcaacaaaagaaacatactctgataggaagcggctgaaggaagagttcaaatggagggtctgggtcctgcatgcctgggttttggggtttgtttatttgtttgttttttagggctgcaacctgcgccatatggaggttcccaggctaggggtctaatcggagctgttgctgccagcctacgccacagccacgccggatctggatccgagcgcatctgcgacctacaccaaagctcatggcaacgccagatcatcaacccactgagaaagggcagggaccgaacccgcaaccccatggttcccagtcagattgtttccactgcgccacaacgggagccccctgcctgggtttgaacattggcgctgcacttgaccagatgcacaaactcgagaatgtcctctgtgcctcgatgtccccttctgttaagtgtagtaggctctacctcatcgagttgttagtagcataattactcagaagttatctatgactagaattttcattgtcttgcctcgggcaagtcacattacctggagtctgtttttctcctctgtaagggggctgatgtttaatgagattgcaccagggtagtgtggcgcttggggcacctggaggctctagtctggactgcaggaggctatcaggctgctcatcttttcatcatcaggcttttagcccctgctttgcacacagtaggaggtgagacggattgttaagagaggctttaagtgactttttttgttttcagcagcccaagttgtcgggctgaccatggataagccatggaaatagaaaagatggagaaactgaccactgaagcacagtaaattcatcacataacacaggttcatgtttgtatacatttaatagaaatcttgaggagttcccgtcgcggcgcagtggaaatgaatctgactaggaaccatgaggttgcggattcgatccctggcttctctcagtgggttaaggatccggcgttaccatgaactgtggtgtaggtcacagacatggcttggatctggtgttgctgtggctgtggtgtaggccagcagctgtagctcccattggacctccagcctgggaacctccatatgctgtgggtgcggccctaagaagaccaaaaaaaaaaaaaagagagttcccgttgtggcgcagtggttaacaaatccgactagcaaccatgaggttgcgggttcgatccctgcccttgctcagtggattaaggatccagcgttgccgtgagctgtggtataggtcgcagacgcagctcggatcccgagttgctgtggctgtggtgtaggctggaggctacagctccgattcgacccctagcccgggaacctccatatgctgtgggagcggcccaagaaatggcaaaaagacaaaaaaaaattaaaaaaagaaatcttgagaggtaagcccaccatatcaaacctgttatactaacttgatcctgatctgttttcttttccctgacccacccttaccccacacaccttgcaaaatttagttattaccttatttgaaattaaaaacattgtcagcttaataagaccatttaaaggaacccatgtttgaaaatctagttgaaaactagatctatctcacagaaacacacttttgtttcaagaccaacctttctcccaaaacttttgactgactcctcagtcaaaaagccccatgtgttgggaaatacaatctcaagaatttgagatgcaaaatgggtttgtttgctttaaaaagtgctcatttttacttttttaaaaaacttcaaaattttaaaaatacttattttttcttttgttggccaccgtgtggcatatggagctactggaccagggatcagatccaaagccacagttgcgatctaagccgcaactgcagcaatgccgaatccttgacccactgtgccaggccagcaatccaactcacatcccagtgctccaaagatgccaccaatcctattgtaccacggagccacagtgggagctcctacccttttttgttaaatggctgcgccgaagcacatggaggttcctgggtggagtatcaaaccagcacctccacagtgacccaggctgctgcagttggattattaacccatagcaccacagcaggaactcctaaaaagtgttaattttattttaaaaataaatggatccttcctggtatccttccttgtgtattcgtaacttcaaataggttttcgctttcaacaaaaatggccacatgctacataatttttataacttccacttaatttttgtctccatgtcaggacatatggaaattctgcatagtttgtgcagtgcaggtaaaccaaaatttacctttttttgtggctgtgaccatttctgtggaaatacccttctttatggatttttgtctgcctgtgcaaatgcccatggtttagatctgcacacctgaagttgctgggtctgaagtgtgctgtatgacttttagtggtagggtgtgcaggaacttttaggggagttctcatcgtggtgcaatggttcgaatccagctaggaaccatgaggttgcaggtttccattcctgacctctttcgttgggttaagggtctggcatcatgagctgtgctgtaggtcgcagatgcgactcagatcccacattacggtggctgtggtgcaggctggcagctgtagctctgatttgacccctagcctgggaacctccattggcctcggatgcagccctaaaaaaaaaaaaatatatgtatatatatatatatatatataatagccaggaaatgagaacaataaaggagcttagagattttccacttaccaggactcaggcatctggctaaagcacagtcccaaggtaggcattttaatgtgcaggctgacagacgcagacttcgaaaacaaacttatggtcaccaaaggggacagattgaggggtgggatggcctgggggttggagattggcatatgtggtatagggaatgactggccaacacagtatagcacagagaactctacccaatattctgtgataatctttatgggagaagaatctgaaacagaatggatgtgtgtatgtgttaactgaatcgctttattatacagcgggaattatcacaacattgtaaacaactatatttccataaaacttaaaaaaaaaaccccaactcataaaaatgtgcaaactagcactcactgtgaaggaagtggggcccaattacaaaagatgtccaaggaccaatcctttttaggatgcagctgctcaaaataaggcttgttggattttgtgttagtcgtggaagttgccaatggagagcgagaaataaaatccaccattcccgtcccttcctcctttcttcagcttcttttctttgttgatcggcttattaaccctttaatgacctgttaaggcgtttctataggtttttcgtaatcaggaaacttaagtgaagtatttttcttggacgtgcaatctttttttttttttggtctttttgccttttttagggctgctcccgcggcacatggaggttcccaggctgggggtctaatcggagctgtagccaccagcctacgccagagccacagcaacgggggatccgaacggcatctgcaacctactccacagctcatggccacgccggatcctcaacccactgagcaagggcagggatcgaacttgcaacctcatggctcctagtcggattcgtcaaccactgagccatcatgggaactcccccgttttttcttatgtgagaatattgctcagcacatctgcttggtcttcctatctacattcaccttgtgtgtggtactttcgtcgtccctcctcatgggatggtacactaatcgcgttgtttaaacgagtgatttactgcagatttgttatgggcccagggtggatttgagcagcccaggagcgagtgggtttccagcgtcatgtttgtggatggcatgcagtccagcgctgagtgggggtggggcagagcgccaagggattgttttaataaattgcctgagtgtccctggggcagccttaacaagttggcgcaaactggatggcttaagacaaatgtattctcgccgttctggaggctggacggggctggaattgaggtgtgggcagggttgattccttctgaaggctgtgagggtgtgtctgtaccaggtctcctcatttcccttctcttggtgtccagccatccttggctcatagccggtaactctggcctcatcttcacacaacctccatctctcacctgcctttcttctctctttaaggacaccaggaattgggcttgagacccaccctaatgacatttgcaaaggaccccccccttccaaaggtcacatgcttgggtgggctggggttaggacttgacatggggggggggggttgagcttggcctctctacccgagtgcttggatcactgactcttggaacgccttgtccccttacatagccttctgcttgttgggacacaggtcatgaaggtgtctgtattgtgagttgtggtttttgccaaaaaattgccccacatacatcattttctggatcgaggttcttagctgtctctctcctgtcacaggtgcgccaatgaaccgcccggggactggtgacgaggtgagcgcggacgcagcggggataaagaggcctcggcgagaggagacccacatctgtgagaaatgctgtgctgagttcttcagtttctccgagttcttagaccataagaagaattgcactaagactccccctgtcctcatcatgaatgacagcgaggggccggtgccttcggaagacttccccggggctgtgctgagccagcagccacacagcccaagcaggaaggacactcacagcgaggaggggggcggctccggggacacgaaggagaagccggggaccgagtccgttgtgtacttgaagacggaggctgccctgccgcccacaccccaggacataagctatttacccaaaggcaaagtggccaacaccaatgtcacgcttcaagcactacggggcaccaaggtggctgtgaaccagcggagtgcggacgcgccgccggcccccctgcccggcgccaacagcatcccctgggttctggagcagatcctgtgcctgcagcagcagcagctccagcagatccagctcaccgagcagatccgtgtccaggtgaacatgtgggcctcgcacgccctccactcgggtgtggccggcgccgatgccctcaagacgctgggcagccacgtgtcccagcaggtgtcggccgccgtggctctgctcagccagaaagcgggaagcccgggtctgtctctggacaccttgaaaccagccaagctacctcacgctaacatccctcccgccgccagctccgtgtccccagggctgacgcccttcgccctgaagccggatgggacccgggtgctccccggtgtgctgtcgcgcctcccgggtgcattgctacctcaggccccgggctctgtgctcttccagagccccttctccgcgggggcgttagacccgtccaggaaaggcaaagggaagcccccgagtgtgtccccggtggatggcaaacccaaggacgaggccctctacaagcacaagtgtaagtactgtagcaaggtttttgggactgatagctccttgcagatccacctccgctcccataccggagagagaccctttgtgtgctctgtctgcggccaccggttcaccaccaagggcaacctcaaggtgcactttcatcgacacccccaggtgaaggcgaacccccagctttttgctgacttccacgacaagatgacggcaggcaacggcattccctgtgcactctctggccccgtccccgtagatgaacccggtctctctttagacagcaaacctgtccttgcgacggggaccccccatgtagggctacctcagaatctctcttcggggactcaccccaaggacctcaagcaagacccgcagcccgggccttctccagaaaatgagaatggacccatcctgcccggaggggggccgaaccataattcccccagggttggtggcttccaagggagtggggcacccgagccggggtccgagaccctgaaactgcagcagctggtggagaacatcgacaaggctcccaccgaccccaacgaatgtctcatttgccaccgtgtcttgagctgccaaagctccctcaaaatgcattaccgcacccacaccggggagaggccgttccagtgtaagatctgtggtcgcgccttctccaccaaaggcaacctgaagacgcacctgggggtccaccggaccaacacgtccataaagacacagcattcgtgccccatctgccagaagaagtttaccaacgccgtcctgttgcagcagcatatccggatgcacatgggcggccagattcccaacacgcctctgcccgagaatccctgtgactttgcgggtcctgagccgatgatggtcagtgaaaacggcagtaccggcgccgtctgtctggatgacgtggaaagcatcgacgtggatgacgtctgcgcccaggaggcccccagcagctcctccaaggtcgccgtgcctcttcccggcgtccactcggcgtcccccactctggggttgaccatgatggcttccctagatgccccgggaaaggggggactcactgcccttgtcctgcagcgacagagcagccgagaaaacggctcagtggagagcgatggcttgaccaatgactcttcatcctcagtgatgggagaccaggagtaccagagccgaagtccagatgtcctggagaccacctccttccaggcagtctctccggccaatagccaagccgagagcatcaagtccaagtctcccgaggttggcagcaaagcggacagctccgagaacagccgcactgagatggaaggtgatagagctttggatttaacttgggtccattctgggcacaaggtcatccacaatgaacctgggttgaacttgacacgtggagagagtggtgtatgtgaaatagctcttccgtagggcacttggcctctctgtacttgtggatggaggaagtaatgacgacctctgtcctagtactggcgtgctcttattcaggatggttcatgcagatggggtttggatagtgtgcttatgtttggttggtttctactttttgtgttggagccatgtgggggtatatagctaatattaagtaaatcctccaggagaagaatttttgagaaaatgggcactgctttttggccatagttccttgattctgaaatcccacgccctagtgtaaggttcacagattgataacttttaagggagagaagagaatcgaacctattttaaataacacatataaattggagttcccgtcgtggcgcagtggttaacgaatccaactaggaaccatgaggttgcaggttcgatccctggccttgcttagtgggttgaggatccagcattgccatgagctgtggtataggtcgcagacgcggctcagatcccgcgttgccgtggctctggcataggccggtggctacagctccgattcgacccctagcctgggaacctccatatgccacggaaagcagccctagaaaaggcaaaaagaccaaaaaaaaaaaaaaaaaaggtataaattaaagggtgcctaggagttccctggtggctcagtgggttgagggtctggcattgtcactgctgtggctccggttgttgccatggcgtgggtttgatccctggcttagaaacttttgcagacctcaattgaggccaaaaataaatttttgggatacctattgatggcattaatggtaaaatgggaggaatagcaacattagagaatgagaaggatggtgtcagggcatactttaaaggttactttacacaggaatgtgaaacttgagttgctttgcatgggtttgtgtgttgcccatatcttttcttttctttttttgctttttagagccacatgtgtggcatatggaagttcctgggctaggtgtcgattggagctgtagctgccggcttacaccacagctgcagccatgccacatctgagccacatctgcagctcacagcaatgccagatccttaacctactgagcgaggccagggatggaacccctgtcctcatgtacgagtcaggtttgttactgctgagccacaatgggagctccttgtccttaccttttaaaagccaaaatccatcaaaattctctaaatcttgtagtcattcatctctgtgcatgtgaccaagcaaaaggaaaacttctgagataacatttcctgaaagccatttgtaggcgctcaggcagcgaggcacctgtcatcgaagctctttctttggtttgacaaataagtgattgtgggatgataaaggcttgcgatttttttttttttcttctctgtgcacatcaggtcgaagcattccatcgacgtttatccgagcccagcccaccacctacgtcaaagttgaagttcctggtgcatttgttggtcctgcgaccatgtccccaggtatgacaccgttgttagcggcccaaccccgacgacaggccaagcagcacggctgcacgaggtgcgggaagaacttctcatctgccagtgctctgcagattcatgagcgcactcacactggggagaagccttttgtgtgtaatgtatgcgggcgagcctttaccaccaaaggcaacttgaaggtgagtttcttgagggtttcagcaggatcggggctcagtgtcaggtgacatcattctaaggggccaagtgggctacttattacacaggcttctctgacatcatagcatctctgaaattgggatgctggttgcagtcagtgcctgtatatccacagctgagtctgaagcgtagctgtcacgtgttatcacgcaatattgctaaatcctttaaggagttgtgtgtgctttcagacttaaccaccctgtatgtttttgttttcctaacctgctagcttgaaataaataccatgagttaaacgtgtgtgctatagtaccgctggagttaaaagaggagagcctccagggcatcagccattccttcaaactgaacagctgggtccttccagggactggcctctaactattgttaccataaactggttccctctaggatgttacctggggccgaggtgggggccggggtgggagtcggggtgggggactctgccatgtaagtatggaaagtgcccaaaggacagaggacgggaacgagggacctgggttttcctcttggccctgcctctagtttgtgtaaggcgtgcttctctggccctcttttctctgcctctccagtgagcagactagttgaattctacaggctagttagaaaaaaaaatgttgggagttcccgtcgtggcgcagtggttaacgaatccgactaggaaccatgaggttgcgggttcgctccctgtgcttgctcagtgggttaacgattcggcgttgccgtgagctgtggtgtaggtcgcagacgcagctcggatcccgcgttgctgtggctctggcgtaggccggagactacagctccgattcgacccctagcctgggaacctccatatgccacgggagcagcccaagaaatagcaaaaaaagacaaaaaaaaaaaaaaatgttgaagcttcatcttacagttgacctagaagactttgcatcattttaggaatcaaaaggactcattcggatttcccttgtggctcagtggtttaagtatctgtcactgtcacgccacagcctgggtccctccactcctatggtggggattcaatccctggcctatggcctagagacttcagaaaccaaaaaaaagtactgattaaggagctcccatgtggaattcgagggttaaagatccggtgtttgtcaccacagtggcttgcgttgctactgtagcacaggttcaatgcttgctgcggatgtggcaaaaaaaagcgcctattttaaaaatctatatccttttaattttttagtcaaggtggcaagaatgtcgggggggagcatgaagtaacttaatctgcaatcccaacttgaagcctaatacccactccattcttcaactctttaaagacgctgaaaggggagttcccgtcgtggctcagtggttaatgaacccaactagtatccatgagaatgccagttggatccctcgccttgcttagtggcttaaggacccagcattgcagtgagctgtggtgtaggtcgcagatgaggctcagatccagcgttgctgtggctgtggtgtaggctggcagctatagctccgattcaacccatagcctgggaacctccatatgcgtgggtgcggccctaaaagaaaaaatataaagaagaaaaggccgaagggatttgaaaagtcaaaagctagaccaggcaattgcagtcaagaggccaggttgcagaagttgtgggttgcaggatctcttttcctcatcagcgtccttgcctcgcctgccaccacaggtggaataatggtcattcaccgtggcctgctgcaatcttcccaaagaggcttattttcctctgcagcattgattactgtcattgacacacaggagtgtctaggatgtcagctccatcagggcagggtctgtttttttcaaaaaaaatttttattttttggccgcaccctcggcatgcagaaactcccgggccaaggattgaacctgttccgctgcagtgacaacactggatccttaaccccgagggaactctgcaagattttttttttttttatctcaaatttttatacaagtaattgtcgattcacacaaagggagccctcacccagagctgccctgcacgtgttgcttgtttctctcccagggcagaattttgcaaaactctagaataaatgataaccagggtatggacattgatgcaacctactggtcttagagatttgcccatttgtcttttttaaatataagttcttttaagacagctgtttaggagttgccactgtggtgcatgcagcaccaggatgcaggttggatccttggcctgacagggatctggcattgctgcagctgcggcggaggtcactactgtggcttggacctgatcttcagcctgagaaccccctgtgccccagggcagccagaaaagctatttttatttatttatttacttttctctttttgccattttcttgggccactcctgcagcatatggaggttcccaggctaggagtctaatcggagctgtagcttccagcctatgccagggccacagcaacgtgggatccgagccgcgtctgcgacccacaccacagctcacggcaacgccggatccttaacccgctgagcaagggcagggactgaacccgcaacctcatggttcctagtcggattcgttaaccactgtgccacaatgggaagtccggaactgctgtttagctagaacctaaaggcacccctgactttggtttgccaacacgcagtcccgtctgtttcggtggaaacctttctgtctgtctgcccgtaggtccattacatgacgcatggggccaacaacagctcggcgcgccgcgggcggaagctggccatcgagaacaccattgctctgttagggacggacggaaagagagtccccgagatgttccccaaggaaatcctggccccttcggtgaacgtggaccctgtggtgtggaaccagtacaccaccctactcaacggtgggctggccatgaagaccaatgaaatctccgtgatccagagcggtggcattcccaccctcccggtgtccctgggggccagctccgtggccgctaacaccgcgctctccaagatggatggttcgcagtcagcgatcagcgccgaggccgagaagcccggcgccgccgacgggggcgccgccaaacaccagtttcctcacttcctggaagaaaacaagatcgcggtcagctgagctaaaggagcacgcgcatgcgcgccagggagcgatgcaggcagtgacctctctccatctgtacctttttttcagtttggttttttttaaagaccccatctcccatttgttttcttattgatgtgcaaataatgtttacagttgtgaccacaacctcaggcacgtccttcaatcccagtgttgctatgctgctttgcaaaaacacaaacagcattcatgcgaaaaacagatacagactagttggtttggttttgttttgttttgtttttttaattttggaaagaagcgggtcttgcaaagtagttttgttacttgcaacaaactatacataaaacctttgtaccacccagagcaactgtttccaaagactgtcccctatttcaagttggaaggtgttgaaccaccatggagaagacaactgtttagcctgtttggagggggtggggggtggggactgtgtgtctggggtgactgtatgcaggtacatggacaaggtctgtcttctctttaggaacctattttgtattctcccaacccttcacccacccacccaactcccctctttttttttttttctccctcatttttgaatgtacttgtttttttttttttaaaccaaggttgtagaattccaaaagttttttcagccttggcaccttaagtaggatgccctcaggtggactgatttgtgtccttggagtgtcagtgcttgtgttgctgcttatttaaatacagttcaggtggagccccaagcgtgccaacaccctccctctgctttccagatgcttccttcttcctaagccgggagagggtgagcacctgtgcagggaaccttaggtgacttaattccgttcaccagtgcctcctccgtcgaagagctgggtctccattcttcaagaaacaaactcttggaagggtgtccttcttattctctgctaataacttcttagcctgatttataccccagtttccttgatgatgacttgctgccaagtaattatgaagactttgttttttcctgattattgcatgaaggctaccaagttggaacaggcaagtcctggatgtgaaagctttaatttatctacctcatttatttgttatttttgtagcgatagtctctattttcctattggatgaccgctgaagtgttccaaggccctgtctcaaacctaagagttgctgtattggtgggaacagctggacgttcgggatgtagatgtctttgtgcttctctttttcttaatcccctttttgtatatgtaatatgaaaccgatgatgaagcgttactcaaaaggatttaacaaggaaggagaaagacccacatttctgggcggagaagtttctgcccctctttgtggaagagcggactgtgactattaccaaaagtttgtctctccgtgattgcacccgtctttaggatccaaaaaaaaacaaaaaaaaacaaaaaaaactttttttcccttttttgccaagttgtgcctttccttctggaattgtaagtgatcacaataatagtacctgtttacactgtgaagtggatattgttacagaagacaccaccagaggctttctcacttgttaagctaataaataatgccttgttgaatgtatgatctacggagaaacccctgtagttttacctgctgatgctgtccgtctgtctggagaataaattttggatggttcttttttccccta

SEQ ID NO: 16 - protein, 1050 aa, Sus scrofa
MSRRKQAKPQHINSEEDQGEQQPQQPAAEFADAAPSAPVAGEPGAPMNRPGTGDEVSADAAGIKRPRREETHICEKCCAEFFSFSEFLDHKKNCTKTPPVLIMNDSEGPVPSEDFPGAVLSQQPHSPSRKDTHSEEGGGSGDTKEKPGTESVVYLKTEAALPPTPQDISYLPKGKVANTNVTLQALRGTKVAVNQRSADAPPAPLPGANSIPWVLEQILCLQQQQLQQIQLTEQIRVQVNMWASHALHSGVAGADALKTLGSHVSQQVSAAVALLSQKAGSPGLSLDPLKPAKLPHANIPPAASSVSPGLTPFALKPDGTRVLPGVLSRLPGALLPQAPGSVLFQSPFSAGALDPSRKGKGKPPSVSPVDGKPKDEALYKHKCKYCSKVFGTDSSLQIHLRSHTGERPFVCSVCGHRFTTKGNLKVHFHRHPQVKANPQLFADFHDKMTAGNGIPCALSGPVPVDEPGLSLDSKPVLATGTPHVGLPQNLSSGTHPKDLKQDPQPRPSPENENGPILPGGGPNHNSPRVGGFQGSGAPEPGSETLKLQQLVENIDKAPTDPNECLICHRVLSCQSSLKMHYRTHTGERPFQCKICGRAFSTKGNLKTHLGVHRTNTSIKTQHSCPICQKKFTNAVLLQQHIRMHMGGQIPNTPLPENPCDFAGPEPMMVSENGSTGAVCLDDVESIDVDDVCAQEAPSSSSKVAVPLPGVHSASPTLGLTMMASLDAPGKGGLTALVLQRQSSRENGSVESDGLTNDSSSSVMGDQEYQSRSPDVLETTSFQAVSPANSQAESIKSKSPEVGSKADSSENSRTEMEGRSIPSTFIRAQPTTYVKVEVPGAFVGPATMSPGMTPLLAAQPRRQAKQHGCTRCGKNFSSASALQIHERTHTGEKPFVCNVCGRAFTTKGNLKVHYMTHGANNSSARRGRKLAIENTIALLGTDGKRVPEMFPKEILAPSVNVDPVVWNQYTTLLNGGLAMKTNEISVIQSGGIPTLPVSLGASSVAANTALSKMDGSQSAISAEAEKPGAADGGAAKHQFPHFLEENKIAVS

SEQ ID NO: 17 - DNA, 16212 bp, Bos taurus
gcgcgttccggccgaaggggggtaaatttcccaactccaggaatttgtggcggagtgggcaaataaccgcggctctccaggcgccccgatgctcgcaccatgtcgaggcgcaagcaggcgaagccccagcacatcaactcggaggaggatcagggcgagcggcagccgcagcagccggcccccgagtgtgcagatgcggccccagcggcgccggcggcgggggcgccgggtgagtggggctggggggcgcgcgccccgggcgggcagcttctcagacgctcgcccgcccctcggagacgcgggctttggcgaggccgcgactccctccgcagattcgggaacttggatccgggggcttagttccaggggctaaccggcagcctggttccccacccccacccccgccctcgttaattttacactttttctcgcttctctctcgtggaagtttcacccccaggtctcgctcttactgtaggattgaccccgagcctctgcctgcccctcgttcctgagaggtccccttctcctcgtcctctgcccctctcttaattggctgcactcccctcactagtaacctcccccccacacttgtaacttaggctcccctcctccctccctggcgccgcttttaaaagaaaagaccccgggggtccccactctattgcctcacccgttgggggcttttctaggcgcctggggaaggggcgcacctttggaagaccccccgggggaggccgatctgttgcacgcgcccctcccgtgccgtgagggggagggggcgcgacctctccccaccccccaggagctggggtgcgggccacccgcgctgcggaggggactgagggccggaagaagtggaggacgagggcacaagattgccttcttttccgtttcaaaaatttctttttttggtttccctctttgctcccggggctacgccgcctgccgatcttcgccctaacctttcggggcctgacctccagccatctttgatttccgacttcctaaaaataaccgcgggcggcgggaggggtgcgggcccccgggcgcgggggtcgcgcgcgctctgcagtcccgctggggtgtacccgcctggcgttgcgcgtggcttttctggcgcgccccgctttccgaaaagcgcgccccgggggccggaggggagaggtcgcgccagggctgggcggtcgcggccagggcgagctcccgggggctgacccggcccacgcttccgcgccgcgcctctccggggtcgggaggagttcgggacccccagcccagtcggagcggccgagcggactcctctctccctaatcatttaacctcgggggctttaggagcgagtcgctttctcactatctcccctccgccctggcccgccaaattgtcgcctgataagtttttcgcgtacgcgtggggggagggggcgtctttaagctcctctcgggccttgttggtggcttcgctcccctcgccgcctgctttctaatttcccagcgggtgatgggggtgcgcgcggcgaccccagtcgctccaatccactacaacgaggggaagagccgtcgccactttttggttaccgtaccctttatttcggggagggaatggaatacattttctgaatctctaagattaatgtaaatccctatccccaccccaccccccaaataattttttccagggcaagttaaagagatcggcttgaccaaaggggcgtctctgcggttttgggggcgtccaatggtcagggcagcgcgcaccggaggtcggaggagggcggcctctctttgtgccttgggaggggggtgggggggaaggacggagaggcttcgttgcctggcccacctggaacaaaagggttaaccctccgcccgcccgcttcctcccgggaaggaggggcgagctcctggctctgacccctcccctggtcctgctctgacctccccttccccctacccgcttcgttttgggtgggcgcactcttagtgcggcttttggtgggattcggcaccttagggggagctggttacggggggcgaggggacgttcttaaatgaacgctagctggagtcggccaccagttaacccgagctggttaggatcgcgagcctggccgtgcgctccctccacaattggggagggggagttgctattgatcgctggggttgcggtggccgctgagctgcgcgcgggcgtcccctggaggcccagccgggaacctcgcgctctgctgagaggcgggtcccctcgcaggtaccggctcccacctgatgggagggacgcgctgggccgggggttgaagagctctgggctgggcgctcctcgggacaccagtcagttctttgcgctctccctggcggtgccgaagtttctttggcaagtctttagcattcttggaaagaattcttcgattctaatatgtttgcagagcccccagttgccgccgtgaaacggaaggtagtagtacattcccattttaatggatattttgtgtttgagcccccgtttttttgcgtataattaaagacatccagtttagactgatcttatagtgcacagcgaatttgataccatttaaatgcactttttgagggaggaaaatgaagtttggcgatctgttagatccaaaaatctgcaggtggtcaggggagtcaggccatgtacagaaaaattagcatttttttcaaaagaggttcaaatggcctttgtgctaaactggattacaaccatcaacgatcaagattcccccatttcaaataaccgcttagccccagtttctgaactgaaacgacctacatctgcggtaaggagtcagaatgggacacttgggagtttctgttttaattgagggaaagggaattcttggtgacagtaaccttggtgaatgttgcaggccaagtttctgtgtttgcatctggctttctaaaagagaagggctacagcttgcccgaacctcttttgttcctttaaaaagaagttgcacaagtcgctgctagctgatccttcaagccccttcagccctcctcctgttagggagccatcttgggagggagggatagagataatgcttcctctttttaaatgaaatgaagttttttgtaaggtgtaagagtgaggtgtgcattccaatctggttgtaggactttcagctgcgtaagctttgctttctgagcttctgggttctttctctgtacccgggagatgaaacaccctatttagatagcttcaactatagaggcccactgtgtgctggaaatgtgatcggtaattaattttattcaaaataacaattaaaaaaaaattgtgtcaggacagctgaactgccaaattgggataattctgcagttttatctgtagcccacgccaggctggagacctcacgtacattacctttgatttccgtttttgctcagtttaaacttcagctcctggttgcagtggcttgccagagtttccttgttctgtttgatttaagtcgtgctctaaatccaagaagttgtgattatcgtggttttagaggagttggttatgggatggaattttctgtcagtattctatcagatggaggagccgggctgctgtaggctttagaacttactctattccaggaagcaatttggaaattaaacagtttgcatttggtgctccaggctttactgccttggaaaaaatgatggaaagagtttaagatatccctttttcatcatccttcacctgtgtgcctttgattgtttaaacaagcatctaaaccatctttagaagcctctaaacccagataagaactgcatctccaatcattgccatttttcccctaaaatttcgagtccatgtcaggtattattctaaggggttctggggaaggagagagcaaaaactgcctgcgtgaagttaacaacttccttttaaaagatgagctccagttgaggcaaagtgggatctatctctagcaacagcagagcttgcacacgttagcacaaaaaactttgatttttttacttcttccttttcagcaaacttgaattttgatccaagacagttggaacaattttttttttgtacctttattaaatggaaacgtaattacagctctaatttgccacctacaaattgagttaaaggcatttctcagattgctgaatgcagatgtaaaattaagcactttttttgaactggttcagttcttaaggatgtctcagtttccttttgttttttggtaagcagttatcctgctggtgggggtgtggggtaagagatattaagtactttagataatctactcattgtagttcttttaatataggaatgggagggaaaaaaagataagcttcaggcataatgcttgtctcaagatatacggttggtttcttaagcattttcataggcttcagaatttgattggcctctggcagatgagcttttcttgctatacaatagtaagagtattttctatccatttggcagtgattgaatctaagccccctgctgggtttactgcattcttccaacttattggataactagatgctgagagataacattcctaaaattcgggagtggggggtggggtggaaggatggaagatctagttgctgtaatccctctgaactttgctttttccttttgggaagggttaacttaagcatacccagcgattgttcataacagagtcctcttactcttgggcaaatacgctttcagtatttgccaatggtggtttggatgtcgaagtactttactgcaccagcaaacagagctcctgctgtttgaagactcagagtgggatgttgccagtattgcttggaggctccagaagaggcgagcctgtgtatacagtgcctgcaagctggtattcaggttgtaaatcactcttgggaactgctgggtccttctggggcagggagcttaacctttttcgtgccacagttccctcccccaacagaaatattgaaatgcgtacagtgaaatacatagaaataccaaggaaataaatcgtgttgagatacactgagcgaaaatgattggaaacgtttgtgatacagtaatacgtgcttcttcatgaacacagtagagaagatctagcagtcactcaggtaaccagaatttccagtaacacaaccgctttaacatcataggaaaatacctgctttctgttgacgacataggcacgggctctgcaaatactgccgaggtgtgtgctcagtgttcacgactgaaagaatattgtctgcgtgggggtgaaaactttttcttgaacggagagagggagacaaaaaacatatatatgggacttccccggtgttccagtcgttaagacttcgcgcttccactgcaccgggcacaggttcctgagatcctgtgcgctgtgcatcctggccaaaaaaaatatgggtgttaacagtggtttgtggtcttccaaagaatcatagtgcataaacagatacacagtatgtttgtggtattaaagttttggacgggggtgaggggtggggagagtaggggggaaaatgctttaaaagctttcctagaggggtaaaatgaaaaaaaggaagtgttctagcagaaacagtaataaatgaggccgctaactttagtgcctttttcagtgtatttaagactagagtccctgctcttgtgttttctagtgagcagtgtggcaccttgagtcatttattcctgagcctatttccacgcttgcacgttggaagcaaagatgcttgtctctgtggctgcaaagataaatgagttaaggtgtgcgagtctgcagtgggtgctctgtggccagtatacgggggatggccgtggttgtgctttggcgcttaacaggcagaatgggcatttgtacacaggctttgctagagatttccacaagtagcttggctgagacgaggggtgtaacatgctaattaaaaaaaaaagccaaaagtgtatacattttgaagtttctcttccaccccaggcctgtgctccagaagccagggaccagcctcagcaactcttacttcagaagtttcccacggacatacttatgtctcttcccaaacatggcaggggggaagcacattatctgtacagcctgttctgtgcattttttcctccttttgaaatcactcttgagtggttgtcctatagagcaagcacctgtagtaaagagctacaaaatagtcatcttttttctgtaccccgatttatttcatcagaatcttgctggtgaaccccagtgtgtccatttttgtttgggctgtttcttgctatgagccctgaaccccggcatcacagaaagtaaattcttaccaagggagttgctgggtggaagaattgcagtataaccatggtggtggtggattgtactctgaagaagttgtatctatttatgcatttacctggctggtatatttccctcccaagagaaacttgctaagtttcccttggaaagttcttgacacataattgccagagttgcacttccagaaagatggtaccacttaacacacctccacaagcaccccattacaaatgtacaggtagatacaccatcttaatgattctgggaactgatgaatacttttaacttgattcttgggaatttggttgctttagagcagttgtggagttggaaggaaggtggtacctacctactgttccccatggacatagctggggtgtaattgatgcttttgaactgtggtgttggagaagactcttgagagtcccttggactgcaaggagatccaaccagtccattctgaaggagatcagccgtgggatttctttggaaggaatgatgctaaagctgaaactctagtactttggccacctcatgcaaagagttgactcattggaaaagactctgatgctgggagggattgggggcaagaggagaaggggacgacagaggatgagatggctggatggcatcactgactcgatggacgtgagtctgagtgaactccgagagttggtgatggatagggaggcctggcgtgctgcaattcatggggtggcaaagagtcggacacgactgagtgactgatctgatctgatctgattgtgtcttaaccctccctgtcccgcccccaccccaacctgccccttcaagctttcctgtcctccccaggggtttctgcaagaggcaagatagttgccatctcagtaaaagaaacagtaggagaggaaggaagtgcatgaatgaagagtgttcacaggaaggatctgtgcatgcctggctttagcttcacaaccttgggcaagttaatgccccgtgcctcagtttacccctctgttaaatgtaatagtctcttttgttaattgttaataacatacaaattacacctgtacataataagtgctcaaaagttatctatgactacattttttattgtgttgtcttgggtaaaagtcagtcacatcttggagtctgtttttctcatctataaatggggctggtgtttaataggattggatggatgtagcgtggaccacggggcacctagaggttctcgtctggactgtaggggacttccaggctgctcatctttgcatcatcagacccctagccctgccttgcactccgtaggaagtgagaagggatgttaaaatgagtgaggctttaaatgactgttaagtcttattttcagcagccctagttgcccaggtaaccaagccacggaaatagacaaggtgaagaaatggctgttcactgaacacctgcagtgcttgcactttgcccagaccctaggacggtgccaggctcgtagccagcactcccaaacacttactaatcacattactgaagccaggcctctaccttaggtcgctgtcatgattgtacacatttaatagagatcctgaggggtaaacctaccatttcaaacctgtgagtgatagattaccataatttctgttttctttcccttggctcacaccagcccacacacaccttgctaaacttctgattactacctagtctgaaattagcaaagattaagtcaatttattaaggctatgctgtggaaatttaaaagagtcagtgtttgaaactgtgttggaaactatagatctttcttaagagaaatacactgtttcaagatcaatccctcccccaaattgttgactgactcctcagtcaaaacccatggtgttgggaaatgtaatcacccaagaagaggcaaaataggttcatttatttttaaaaagtgattattttacttaaaaaataagtgaatacttcctgacatcctggccatttccccattcatttgtacatttcaaataggtgtgtttttttgttttaaacaaaaatggtcacttgttgcatactattctgtaacctccttctacctaatttctgtctccgaattcaggacatacggaaattctacattgttttcatactgtgggtataccaaagtttatattccccgtcctccccctctttttttgtggctgtaaacatttttgtgaaaaatacccttcttcctaggtgggtctttgtatccatatgcaaaggtctgtgatttagctcagcacacctgggattgcggagtctgaggtgtgcctgtgtgacttctcccgtcagggtgtacgcacaacagaacagccaagaaacgaaaacagtcaagtcacttacagagtctccactcgccagggcccaggcatctggctgaagcatggctgcccagtaggtgttttgacatacagactgatcactgtgaaggaaatgggacccaattggcaaaagaaacccagggaccaatcattttcagcaatggaactgcccagactatgaacgttgtttgatttaatgtaacagtagtagaggctgcaaatggagggcgaggaataaattctatcattccatcgtttcctgcttttcttgggcttctttgtttaatgacttgttaatcctttaatgtcatgctaaggcatttctacaggttttcataatcaggaaggtcagtaaagtctttttcttggacgtgcagtctcccccccccccctttttttttttcagtttttttttccccttcacacataaaaaacattcctcgggtatcggctttgtcttatttaggtgtccatattttaggtgaatttagtaccaccgtcatagttcttggcacctttaaacttccagcctctctggtgggaaggtggagttcccacattgtctgaaggagtgatttattgcagtttcactttttgatggacccagggtggagatgaacagcaggcttccaatgtcattttaatgaatgacatgaaatccatttgcttttgtaagccagctctgaggtggggcagagagctccgtggggattattttaataaattatattgagtttcccagcactgccttaataataagttggtacagattactagatggccagtgcaggagatgcaagatacccaacttcagtccctgggtcgggaagagccccaggagaaggaaatggcaacccactccagtattcatgcctggaaaattccatagacagaggagcctggcaggctacagccatggggcctcgaagagtcgaacgtgacttagtgaatgagcacacactaggttgcccaagacaagtctgtttgcactctcctggaggctggacccctgaggctgaggagcagcagggtcattttctcttggaggctccaaggtgagtgtggcccacgcagcctgcttgctgccttctgttgggtccagcatccttggcttagagctttgtatctcctgccttggccttacgtggccttattctgtctcatgtcttttttttttttaatttctatttatttttggctgcactgggtcccctgttgctgcatcctggctttctctagttgctatgcaagggctctcattatgtggtggtttctcgttgcagaatatgggctctaggcccatgggctcagtagttgcggcacatgggctttaattgattcgaggcatgtagcatcttcctggaccaggggtcgaacctgcgtcccctgccttggcaggtggattcttaaccactggaccaccagggaagttttcctcttttctccttaaggacaccaggcattgggcttggggtctactctaattaaagttatacagagcctcccccccacccccaacaagaagaccacatgcacaggggaacgggttaggattggatatttgggggggttatgattccacccactacaccaatggttggctcactgagaccctcattcccttccatggtcttctccttgttaggacacagatcatgaagacctctgaattgtgagttgtggttctcccctccagagatcgccctgtgcccttcctagggtggaattctcatctcctctttccctctcctcgcaggtgctccaatgaactatcttggtggccgcggcaacgacgagctgaatggggacggagcagggataaaacggccccggcgggaggagacccacgtttgcgagaaatgctgtgccgagttcttcagcttctcggagttcttggaccacaagaaaaattgcactaaaacgccccccgtgctcatcttgaaggacagtgaggggccgatgtcatccgaagacttgtcagggactgtgctcagcccgcagccgccgagcccgggccggagggagggccaccgggacaatggcagcggcggaggggcccccggggacttgagggaaaagccgggggcggaatccgtcctgtatctgaagacggaggccgccctgccgcccgcgccgcaggacataagctacttacccaaaggcaaggtggccaacaccaatgtcacgcttcaggcgctgcgcggcaccaaggtggcggtgaaccagcgcagcgccgacgtgcctccggcgcccgtgcccggcgccggcagcctgccctgggtcctcgagcagatcctgtgcctccagcagcagcagctgcagcagatccagctcacggagcagatccgggtgcaggtgaacatgtgggcctcgcacgccctccacgccgggcacgcggccgactcgctgaagacgctcgggggccacgtgtcgcagcaggtgtcggcggccgtggccctgctcagccagaaggcggggagcgccgggctgcccctggacgctctgaagcccgccaagctacctcacgccaacgtcccttccgccggcggctccgcctccccggggctgccgcccttcgcgctgaagccggacgccacccgggtgctccccggcgtcctgtcgcgcctccctggggcgctgctcccccaggcccagggctctgtgctcttccagagccccttctccgcggtggccttagacccgtccaagaaaggcaaagggaagccaccgagtgtctccccggtggaggtcaaactcaaggacgaggctctctgccggcacaagtgtaagtactgtagcaaggtttttgggactgatagctccttgcagatccacctccgctcccacaccggagagagacccttcgtgtgctccgtgtgcggccaccgcttcaccaccaagggcaacctcaaggtgcacttccaccggcatccccaggtgaaggcaaacccccagctgtttgccgacttccacgacaagacggcggtgggcggcggccttcccttcgcgctggccggccccgtccccctcgaggaagccgggctctccctagacagcaaacccgcgctcgcggcggggacccccagtgtcgtagggctagctcagaatctcccctcagggcctcaccccaaggacgtcgcggggggcccgttgcccggcgacctgcagcccgggccgtctccggaaagcgaggatggctccatcctgcccggggtggggccgacccatccctcccccagggtcggaggcttcccagggggtgggccgccggagccggggtcggagaccctgaagctgcagcggctggtggagaacatagacaaggccaccaccgaccccaacgagtgtctcatctgccaccgcgtcctcagctgccagagctcactcaagatgcactaccgcacgcacaccggggagaggcctttcccgtgcaaggtctgcggccgcgccttctccaccaaaggcaacctgaagacgcacctgggggtgcaccgcaccagcgcgtcggtgaagacgcagcactcctgcccgatctgccagaagaagttcaccaacgcggttctgctgcagcagcacatccgcatgcacatgggcggccagatccccaacacgcctctgcccgagagcccctgcgagttcgcgggccccgagccctcggcggctggggagaatggcagccccggcgcgcccgctcacgatggggtcatggaagccatcgacgtagacgaagcctgcccccaggaggccgcccccagcagctcctcgagggtcctcgggcccctcgccggcgtcctcgcggcgtcccctaccccggggctggccacggcggcttcgctggacgccccggtgaaggcggggctcgctgcgctcgtcctgcagcggcagggcagccgagaaaacgggtccgtggagagtgacggcctgaccaatgacgacgcctcctcggtgatgggcgaccccgagtgcgccagccgaagcccagacgtcctagagagcacgtccttccaggcggtctcgccggcccatagccaggcggagagcgtcaagtccaagtctccagacgccgacggcaaaggggacggctccgagagcagccgcactgagatggaaggtgatagagctttggatttcacttaggtccattctgggctcgaggtcatctggaaggaacccggggtgaccttgaccaatggagagtgaactagctcctctgtagggcaattagtgaccacctctgtcatagtcctgacatgcttttacttaggacagttcttgcagattgggcatggacagtttactttgcttggttttgatttttgtgttggaggcccgtggtggccacacggggattctttggagttaatgctatcctagaagagtatttcaggaagtggacaccagtgagataattcatagttccttgattcagagatcccactccctaatgtaagagtcacagatgggtaattcttgagggagaaaagagaatctaacctattttaaattgtggggtgcctgttgatggcattaatgaggggacaccattgtagaatcagaaagatggtgtcagagcagactttaaaggtaacttgatgtggggattgaacttggaattgcctgcatgcgtttctgatgccgataccctttaaaatccaaaatattgggttggccaaagagtctgttcgggcttttccacctcctgttttggggaaacccgaaatattttttggctcacccaataggaaaaattctttgaagttttggagttgtcattctctgtgtagctaaataagaagaaagctgcttccaaggtgtaaacttcctgaaaggtgtttccagactctcaaacggcggcggggcagtggtgggcaaaactcctttcttggtttgaagaatgaatgaatgacgtgatgataaagtttttttttttttccttctcttttccctgtgcacaggtcggagcagcgttccatccacatttatccgagcccagccaacctatgtcaaagttgaagttcccggtgggtttgtgggtcccacgaccatgtccccaggtatgacgcctctgttggcggcccagccccgacgacaggccaagcagcacggctgcacgaggtgcgggaagaacttctcgtcggccagcgcgctgcagatccacgagcggactcacaccggtgagaagccctttgtgtgcaacatctgtgggcgcgctttcaccaccaaaggcaacttgaaggtgagcctccttagggcttccgctgggggtggggggctcagtgttaagcagcgacatttatccctaacgaatccttccatcagggccaagtgactgcgtgcctccactgctgggtcccaggttcaagcccaggttggggaactaagatcctgccagctctgcagtgcagtgaaaaaaaaaaagaaaaaagaaacaggctttctcacagcatctctgaagttgggatgttcgttgccttcataaagtcctgcagatcgggaaacatagattgtgattgtcatgctcgtaatataaaatggataaatcctgtatgggtttgtcttgtgcttttagacttgatgactggtcttcaactttgggaaaataattgcagaaaggaggctgggttgaagaagcaggaggcagtagagtatctttgctcttcagaagagtccctttcttgtttgccaccgtagatgaaataacgttcgttcctggtggcttgtgtaaccttcccagccaggcttatttttgcctcagcaatgattgcttctgttgacactatgtatgtgggatgtcagttccatcagggcagggtctgttttgttcaaaaattagtttttataactcattttttattcgggtcagttcccacaaaggaggaagttgcacagagatgctcacacgcttgctaatttctcccagtggtaggactttaattttactcacctgtagaatacatgggcttctcaggtggcactagtggtaaggaacccacctgcccgtgcaggaaacatacaagagatgtgggtttgatccctgggtcaggtagatccgctgcagggcatggcaacccactccagtattcttgcctggagaatcccatggacaggagcctggagggctacagtccatggggttggtcgcaaagagttggacacagctgaattgacttagcgtacgtgcagagaatcagtcgtaaccagggcattgacactgatgtaagctcctggtctcacctgttttcccattccacctgcgctcagtgtctgcatgccttcagttccataccatttgttacctctgtaggtttgtgtgttaacaccttgtaaccctagcactctgaaacaacactatactacctagtaggtgttgacagaagtgcatgtgaatagatggggaagatcggagtgtgcatccccaactttgtttgcctctagggaggaatgtgggtccattgttgctagatggtctgattgttcccggcccccaccccccctcagagaatagataatctggattttttaatatgaaatctaatttttctcttggctgctctctgcagcttgtgagatcctagttccccgatgcagggttttaacctgtgccccttgcagtgggagcatggagccataacccctggacctccaaggaagtctccgaaatctcattttaaaaatagaagtttagacggaccaagcctgtgcgcagacttgactgtgattggcctacacgcaaaagcctctgttttggtggaaacccttctgtccctcttcccacaggtccattacatgacacatggggccaacaatagctcggcacgccgtggcaggaagctggccatcgagaacaccatggctctgttaggaacggacgcaaagagggtccccgagatgtttcccaaggagatcgtggccccttcggtgagcgtggaccccgtcgtgtggagccagtacgccaccatgctcaacggtggtctggccatgaagaccaacgagatctccgtaattcagagtggtggcgtccccaccctcccggtgtccctgggggccagctccgtggtgaataacacggccgcctccaagatcgacggctcccagtctgccgccggggccgaggtggagaagccagggacggccgacaacgtccccaaacaccagttcccgcacctcctggaagaaaacaagatcgcagtcagctaagccgcgggaggacgcacctccgaggcgcagtgcacgcagcgacctctctagagaactgtgtcttttattgttctctctctttttttaaggcccccgtctcctccagttttcttcctgatgtgcaaataacgtttacagttgtggccacaacctcaggcacggcttacaatcacaatgttgctatgctgctttgcaaaaaaagaaaaaagagaggaaaaaaaaaatccttactaaaacaaatactagtatttttttaaattttggaagaaagcgggtcttgcaaagtagttttgttacttgcaacaaactatatacataaaaatctttgtacaacctcgagtaactgtttccaaagacggtcacctctttcaagttggaaggtattgaaccaccatggagaagacacctgtt

SEQ ID NO: 18 - protein, 1061 aa, Bos taurus
MSRRKQAKPQHINSEEDQGERQPQQPAPECADAAPAAPAAGAPGAPMNYLGGRGNDELNGDGAGIKRPRREETHVCEKCCAEFFSFSEFLDHKKNCTKTPPVLILKDSEGPMSSEDLSGTVLSPQPPSPGRREGHRDNGSGGGAPGDLREKPGAESVLYLKTEAALPPAPQDISYLPKGKVANTNVTLQALRGTKVAVNQRSADVPPAPVPGAGSLPWVLEQILCLQQQQLQQIQLTEQIRVQVNMWASHALHAGHAADSLKTLGGHVSQQVSAAVALLSQKAGSAGLPLDALKPAKLPHANVPSAGGSASPGLPPFALKPDATRVLPGVLSRLPGALLPQAQGSVLFQSPFSAVALDPSKKGKGKPPSVSPVEVKLKDEALCRHKCKYCSKVFGTDSSLQIHLRSHTGERPFVCSVCGHRFTTKGNLKVHFHRHPQVKANPQLFADFHDKTAVGGGLPFALAGPVPLEEAGLSLDSKPALAAGTPSVVGLAQNLPSGPHPKDVAGGPLPGDLQPGPSPESEDGSILPGVGPTHPSPRVGGFPGGGPPEPGSETLKLQRLVENIDKATTDPNECLICHRVLSCQSSLKMHYRTHTGERPFPCKVCGRAFSTKGNLKTHLGVHRTSASVKTQHSCPICQKKFTNAVLLQQHIRMHMGGQIPNTPLPESPCEFAGPEPSAAGENGSPGAPAHDGVMEAIDVDEACPQEAAPSSSSRVLGPLAGVLAASPTPGLATAASLDAPVKAGLAALVLQRQGSRENGSVESDGLTNDDASSVMGDPECASRSPDVLESTSFQAVSPAHSQAESVKSKSPDADGKGDGSESSRTEMEGRSSVPSTFIRAQPTYVKVEVPGGFVGPTTMSPGMTPLLAAQPRRQAKQHGCTRCGKNFSSASALQIHERTHTGEKPFVCNICGRAFTTKGNLKVHYMTHGANNSSARRGRKLAIENTMALLGTDAKRVPEMFPKEIVAPSVSVDPVVWSQYATMLNGGLAMKTNEISVIQSGGVPTLPVSLGASSVVNNTAASKIDGSQSAAGAEVEKPGTADNVPKHQFPHLLEENKIAVS

SEQ ID NO: 19 - DNA, 2399 bp, Mus musculus
gtcccaacggacctctgtagaatctccctgggactctagcaccacattgacacagctgactttagtcttgtggacaacgcctggatcctaggcctttccatcaggagacagtcattttagggctcctcgaccacacctgtaagttattctaataaatccccttcttaggacacacagcagttcgggggggtcaggatttggggtagagttatctctggggaatttctgttttatagacctttgtttttctctcagcttcagcttctagaatgagtctcttactaaggcaaaagcaaataaactaaaaatgtagaatcctgagctctcggccctgtctgtacagagggtggatgttagagtctatgacaagttgtgtgctcctgttctcagtcacaacaaagggagctaaagaatgtgcaaaacatcatccctcctcaaagcaaactcggagcgaccgcgttgttcccttctgcttactgtaacctatgcactggggaacactgcagtcacctctccttcccagtggagggggtgagctgcctcacagcttcaaaccccagcctctggggattaggacagcttgaaaaggggtgggagtggctctccctgcccacaccctaatggtaacttgaaaccactatttgcccttaactccgcagcccctaaaaagcacaccaaattgtaaacataaggaagtaggtttctgagaaacagaccccactggaggaaaaaggccggcccactgcgcagcaggctccggactgcccagtttgaaaagccttctcattccttccttattctcactctgcagcttcaaaagccgagagatgcctaaggagcagcaagaggtggttgtactggggtcaccccacatctcaacttctgcgacagccaccacaatcaacatgcctgagatctccacgcctgaccatgtggtctggtccctgttcaatacactcttcatgaacttctgctgcctgggcttcgtagcctatgcctactccgtgaaggtattgtatgggcctcaaccttgacttacccaggtggtacctgggttgtgtgtgtgtgtgtgtatgtgtatgtttgtgtgtatgtgtggagggaatcccaggaggtgcctggggatccgtgggtcaaggtatctccatcatagcctaaagtttgaaggaagtctccttacttcctgattcttggaatgccccccccttttaaaaaagatttatttatttattataagtacactgtaactgtcttcagacacaccagaagaaggcatcagatctcatagatagttgtgagccaccatgtggttgctgagatttgaacttgaaagaaagaaagctaaattcaagacttcaaagccctagccagaaagtttattcaaggtccttgactcttgcggcttgctagttaggagggctttttgggcttagagcaaagaacaaaggctgtaaagtcatcctaggtaccaactagccattgagacaagaaaggcacgcaaggacaatctccaggacaagctctgatgagtaatgggccacctgctgatatggtttgggcttagccagatgtcctgccgaccaagataaacaccctccctttagagttactatcacatacagctctctgatgtttaaattgcccatttgtgtgtaactgtgccaatcctccccctacccccactcctttcctatataaacccctaactttagagcctcgagaccgacatcccttatctcctgtgtgagaggacctcttggaagagcagtcagtgctcttaaccgctgaaccctctctccagccccctggaaggttccttaaccctgaagattaacactcctggctggatggaaagttcactaggaactaacaggaaacagtagagtaagaggctagtgctgggtgtttctgggtagtcgtgagtgtggtaaagtggaagaaggtccctggcctaaagattaagaggagcacagtgggctaggaaggtgatggggagctgagtcagtacttgtctttccattggccagctccagtgccactgaccatctggtctcttccagtctagggacaggaagatggtgggtgatacgactggggcccaggccttcgcctccaccgccaagtgcctgaacatcagctccctgttcttcaccatcctcacggccatcgtcgtcatcgttgtctgtgccattagatgatgtgagatgtcttgcaacatctcacagtagataacagattctggggcctcccaggcttgctatgtgtttccttgtctatcgctgccccaaaccctagacttagtcctgaccatttgccccatacatatgcaaatgtgacactcacaaatctgtccatggtggactcaataaagtgcacgtgctgtgactttctgcccctgg

SEQ ID NO: 20 - protein, 106 aa, Mus musculus
MPKEQQEVVVLGSPHISTSATATTINMPEISTPDHVVWSLFNTLFMNFCCLGFVAYAYSVKSRDRKMVGDTTGAQAFASTAKCLNISSLFFTILTAIVVIVVCAIR

SEQ ID NO: 21 - DNA, 1401 bp, Sus scrofa
ccaagaagggctgttagcaggaccttgagatgtgcagtccaaccgcaggacaacagggcccataaactcattcaggggctcagtcatttgttccaccctcccaggaccaagacaatgcaccaaatcagaaacaacaggaagtagaaaacactgagaaatagaaactaacccagaaagggaacactggggcccttctgacatccagacacagctgctccgtctctgcatcaagaaacacttctcaaagcatctcctctgccactgaccctggagatgatcaagagccagcacgagatggacgggctgggggctccccagacctcagcccccgtggccaccacggtgatcaccatccccagggagacctccgtgcccgaccacatcgtctggtccctgttcaacaccctcttcctgaactggtgctgcctgggcttcgtggctttcgcctactccgtgaaggtgggtgggcgtcagtggaggagggatgcggggtggcggggcggggggactccaagaaggtgtgtgtgagcctggagaggccccctgcccagatgtgccatgaggtgtgtggggagctgatgcgtgtgtccttccgtgtgtgtgtgtgtgtgtgtgtgtggcttggggctccttcccagtgagagtttggggcgaggctgcgtgggtgcccatggggatggcgggctcaggggtggggtggggggctgtgtctccaccctcccgagacctgcccctgcccggcccaattagagcagttaaacccttccttcacccttgggactcagacccagaaaagagaaaaggtcctttaagggcgctgagccagcaacggggccagagcagagggggaggaggaggcctggggcttcctggagaggctgggaggctgtgaggagggagacccaggccccaggaggggagggaggggcccggcaggccctgtcctgctcaggctccaggggacgggccagggctgggtccccatctgggggaatgggccctggggggccccccggaggacagcgcctggttgtggcctgcacctgctccaggtccccctcaccatgtcttctcctccaggcgagggaccggaagatggtgggagacatcattggggcccagagctatgcctccaccgccaagtgcctgaacatctgggctctgatcctgggcctcattctgaccatcggagccactgttcttctggtgtttgtatacataacagcctaccatatgttagagcgcgcaaagagtaacagaggctactagcagccatccacggcccagcccaagtcccccaccatccacactggccctgccccaccccacccccttcctacagcaggtgctagagacctacctgtccacaactgggttcaataaagtgctcttgcctgtgaa

SEQ ID NO: 22 - protein, 124 aa, Sus scrofa
MIKSQHEMDGLGAPQTSAPVATTVITIPRETSVPDHIVWSLFNTLFLNWCCLGFVAFAYSVKARDRKMVGDIIGAQSYASTAKCLNIWALILGLILTIGATVLLVFVYITAYHMLERAKSNRGY

SEQ ID NO: 23 - DNA, 1132 bp, Bos taurus
agtgcttggttccctctgcgccagagatgatcaaggaggagcacgaggtggctgtgctgggggcgccccagagccaggcgcccctgacgaccacggtgatcaacatccgcagcgacaccgccgtacccgaccacatcgtctggtccctgttcaacaccatcttcctgaactggtgctgcctgggcttcgtggcattcgcctactctgtgaaggtgggtgggcacccggggcgtctccacgaaagtgtgtgtgagcctggagaggccctgcccagacggcacgtgcgtggggagcccccgtgtgtacgggtctgtgtgcacgctctttcgtgtgtgtgttgtgtgtgtgtgagagtgtggcctgggggatcgttcccagggagactcatggcgaggctgcctgggttcacatggggtagagctgggggtctgtgtctctcgcaccccaagacggagtccttcccagcctcatcagggaaggtgcagccttcacactcagcttcagaacacgagtctggtctggaaacgaggaaggtgctgcaaggaccctgacccctggtgtgtgagtggccggtgaaggggcctgagaggaagggaggctgagccctggggctcctggagaggctgactctctgtgaggacgcagacagaggccccaagaggggagggtatcaccggccactgtcctgtccagactccagggaacgggccatcgggtgactgggaacagcaggggagggcctgagccacagcgcccggcggtcacctggaccctcaccacctctcctcctccagtctagggaccggaagatggtcggcgacatcactggggcccagagctacgcctctaccgccaagtgcctgaacatctgggccctggtcctgggcatctttctgaccattggatcgatcgttcttctcatttttgtctacatggcagcctacgagacggctttgcggatcagtagacatggaggccactagccgctgtccatggaggcggtccagggcctccaccttccttggtggctttgcccccgaggcatgagcctgccgcgcccccaagccataggcagcagtttatagacacagattgtcaaccactgaatcaataaagcacccttgtctgtgaa

SEQ ID NO: 24 - protein, 124 aa, Bos taurus
MIKEEHEVAVLGAPQSQAPLTTTVINIRSDTAVPDHIVWSLFNTIFLNWCCLGFVAFAYSVKSRDRKMVGDITGAQSYASTAKCLNIWALVLGIFLTIGSIVLLIFVYMAAYETALRISRHGGH

SEQ ID NO: 25 - DNA, 3848 bp, Mus musculus
acagactgactgctaattgggtcttggttttaggtcttttcaaagactaagcaatcttgttccgagctagcttttgaggcttctgcccatcgcatcgccatggaggaaccatcagagaaagtcgacccaatgaaggaccctgaaactcctcagaagaaagatgaagaggacgctttggatgatacaggtaggccggcgtcggcctttctgcccggggttttgggaagccctcccttctcttctcgttcagctagcacgaggctggtatcactgagcccagcactgactcagtggaggaccagggagtttcaggccatctgttgtgagtgcaaacccaagccagagatgatggttaagaatatacaccttcctcggggtgaaaatgctggttcgtagagataaaaagaaccgggagggagttgagactgtggtatctcggttgcgggatttttaagactcataagaccacgttctgggctgtactgggttgtatggttggggggggggggtaacatttcctcatcagcaattggtctccgcggtgtttttattttgttttgtttttaaatatttatgatttggtgtttgaggcaacagtgcctggactagaactccctgtgcaatccagaatggcatcccaaatccgagaattaaagattaaaggcttccgagtgggctgcagtgtgtgtgtgtgtgggggggggcgttgtttgtgttgttttagcatagaaatcttggttgagacagtctcactctgtggtagtagatacaaggaacgcaaccttgtagccctggctgggctcagtctcgatcctcctgcctctgcctccaaagttttagaattaaaagtgtgcagtgtcatgccggcccttgtgtagcaccggagttttgtttgcttctctgtgtagcccaggttgtcctaggacgctgtacaccaggctggcttgggactcaggaggatccgcctttctcagactttcgagtgcagggattaaaggcagtgccacctcggtgggcgacagcggaatcttttaagcttcagttgaacctgggtttttttttttttttttttttttttttttcttattctcatctactttctttccagctaaatatccttttcaggtaaatggctattcaaggggagcccaagataggctgagccgtgtgctacatgggcccactggttcccactccccagctgcagttgattctttgtccgagggactgcctccgggcactcccggtctagggcgtggctcgagaggagccctcccctccggtctgattagaaaacaaaaaaatgccttgaatctgccagttacacgggaccttcgtatttccacgagataattctttagcctttgggggctttttaaatcttgaggctgttcagcccctactggtctaaaacccactatccaagctaggctagatccaaactctcaatcacttcggaggcagaaacgctggctggctggctcagccttggagtcactttgcctttcttccaggagcgttgtggttacgttttctgtataagatggggccatctactgcgtgtggacgattcaaacggagagagctggtttcccaacatttgtttttcgagactgttttcaagacagggtttcttctctgtgtagccccaggctgacctcgaactcagaaacccgcctgcctctgcctcccaagtacagggattaaaggcgtgcgccaccactgtctggcaacatcccttgttacatagctgtccagaagcatttgagcaggtcagttagatttaggtggaaaaatgaacagccagttttgggaaggttttccagagctgaagctgaacccagaggcactattggggaagccctccagctgagccacattcctgcagcacaattggctgcagagtctatgggagaaggggggggggggggagaatatgcaggtctcagaacctctgaactagacttacatacaggctgcatcggtaacccacagtaaagtagcgcagtggatctctacacaagcactagggtttatgactaagtcctgtgcacgatttgcttcttgttgacccctctgcggaagagggagtatccacttgtttttctctggggtgtattgtctttatgcctcactagtgtcttctgtttcagacgtcctacaaccagaaacactagtaaaggtcatgaaaaagctaaccctaaaccccggtgtcaagcggtccgcacgccggcgcagtctacggaaccgcattgcagccgtacctgtggagaacaagagtgaaaaaatccggagggaagttcaaagcgcctttcccaagagaagggtccgcactttgttgtcggtgctgaaagaccctatagcaaagatgagaagacttgttcgggtgagtttcctgtgcggacagggctgttagacctaagagcaactccagcctcaacgggattcaaggcattttttgttttctaatcagaccggagtatagacaaggctagtgactgcttgtaattcgcagacggagagaatagagttccaaggctatcctctaagcagtcaggctgacctgagctatgtacatatacgcagtaatgagcatcagcactgggtgtttgaaagttaagactccctccctgtccaagctggccctccagttcactccacagtcctgcctcttcagagctgggactacagggctaacttagactagatctcagagctgaagtgggcctgttactctttgtaaaccaggctggccttaaactggggtgatcttcctgcccctgctttcacagagcctagcagtgacaacttctcacaaagtgtttaaagtaggtcttgatagttttgaataattttgtttttgtttttcttttaaagattgagcagagacaaaaaaggctcgaaggaaatgaggtaaatactctttgtttttgttttttgttttgtcttgctttcttttattttattttgtttggagacagggtttctctgtataaccctggctgtcctggaactcactgtagaccaggctggcctcgaactcagaaatccacctgcctctccctcccaagtgctaagattaaaggcatgtgccaccagaggtaaatactctttaaaatttttattatgagtacactgtagctgtcttcagacacaccagaagagggcgtcagatctcgttacggatggttgtgagccaccatgtggttgctgggatttgaactcaggacctttggaagagcagtcagtgctcttaacctctaagccatcactccagtcccaataaatactcttaatgcatgggtgggttgggtgtctgtttcattgtttgatttagactaggaatgtgtctggggagtatgtggaaaaaattctcagcccccaggaagtctggttattgaagcagtaattaaaacaatagataaatgggatttgtttcattgggtttacaatatcctgattaacctattttgttatttatttcagtttgaacgggacagtgagccattcagatgtctctgcactttctgccattatcaaagatgggatccctctgagaatgcgaaaatcgggaagaattaggagcttacattgtacgctgccctggctgtcgacgatgccgcacagcagatgtgaaagctattttttgtttaagattaaactttttctggtgctgggaaatcttaacttgttaacctttaaattgtagataggatgcacaacgatccagatttatgtgaagtttagaagcctcaagctgtgaggcccagggctgaggaataaagtaaatagaatttggagtatgtacgttctaatttccagaaatttgtaataaaagcatttttgtt

SEQ ID NO: 26 - protein, 150 aa, Mus musculus
MEEPSEKVDPMKDPETPQKKDEEDALDDTDVLQPETLVKVMKKLTLNPGVKRSARRRSLRNRIAAVPVENKSEKIRREVQSAFPKRRVRTLLSVLKDPIAKMRRLVRIEQRQKRLEGNEFERDSEPFRCLCTFCHYQRWDPSENAKIGKN

SEQ ID NO: 27 - DNA, 6640 bp, Sus scrofa
tttgtttgtgggaggcaatgggaccttgactcttaggttgggtttgtcttcccctttctggtcgatacagttcttcaaggctacttttgtagcaatttgagaatctaaaggatcagcttccagtggaacccaaagaggaaggagctcctggctgtggctagactcccaatggattcatcggatgttaatccaacccggactcaggattctcaaatgttcgttgaggaaaattcccaggaaacgccgggtaagcctgatgtggctacagggggttcaggaaagtgaaaggttgccttccattttctttttttttttgtctttttgctatatcttgggccgctcccacagcatatggaggtttccaggctaggggtccaatcggagctgtagccaccagcctacaccaggccacagcaacgcgggatccgagccgcgtctgcaacctacaccagatccttaacccactgagcaagggcagggatcgaacccgaaacctcatggttcctagtcggattcgttaaccactgcgccaccacgggaactcctgccttccattttcttctgctgacttcatccagtcttctgaagagaaatgcagtgaagcaaacctcttcagagcaggggagggccagggagtgtagtagggccctcctgaaaaacaaaacaggaagagaggagaaaagtggggaagggtgtctgccttctaggctcaggagtacatttatattacttgcattatgcgaaccaagaaaccatttttttctttctctttgctttccctttccttttcttttccttcccttcttttttctttttcctttatttttctaccatggcacatggaagttcccagaccaggttctgaaactgagcacagctgggacctacaccacagctgtggcgacgtcagatcctttaacccactggggatgaagcctgcacttctgtactgacccaagctgttgcagtcagagtcgtcttcctttatttatttatttttttttttggctttttagggcctcaaccgtggcgtatggaagttcccaagctaggggttgaaaccaagctgcagctgctggcctacgctacagcaatgccaggccagaaatcgaacccacatcttcatggatactagtcgggtttgtttcccctgagctttaacagtagccaaaacaggaactccttgaagtcagtatttccatcagcagtatatgtcagttattgtaaaaggaactgaataggagatccctggtggcccagctgttttaaagtttcagctctgtgactgctgtggtttggaccacttctgtggcacagatttgatccacagcccaggaacatctgcatggtgtgggtgtaaccaaaaaaaaaccctaaattctttttctttctttctttctttcttccttttttttttttttttttggtcttttgtctttttgagggctgcaccagaggcatatgaaagtttccaggctcggggtctaatcagagctgtagctgctggtctacaccacaaccacagcaacaccagatctgagctgcgtctgcaacatacaccacagctcatggcaacgccagatccttagcccactgagtgaggccaaggatggaacatgcaacctcatggtttaacaaaattttcttggagttcctgtcatggcacagcaggaaggagtccagctaggaaccatgaggtttcaggttggatccctggccttgatcagggggttaaggccctggagttgccgtgagctgtggtataggtcacaggcacagtctggatctgattgatatcgctgtggtgtaggctgacagctgtagctccaattggaccccgaagccgcggaacctctatataaagaatgggaaccacccatttttagggtgtagccctaaaagatttttttttcttaatctcaccaacatttctgggatcggctttccagctaaattgactctgtagaaatgtttattaacagcaagtggttttcagagaaaactaatagaagggactggtttataaaagccagtggatatgctttgtaatgtaaatcagtaggatgtgcactggaggcctagaagctagccttgcagtgtgttttttgtttgtttgtttttgtctttagggctgcacttgcagcatatgaaagttcccaggcttaggggtcgaatcggagctacagctgccggcctacaccacagctcacagcaatgccagatccttaacccacagaatgatgtgaagaatcaaacccacgtcctcatggatactagaagttttgctactgctgagccacaacaggaactcgccttgctgggttcttcctatggctaaagtccttgtagccgccaagtttggccttgcagatatacccactgggtgtgaaaccttattccttggacttgggcagggatgagtggggtagggtggtatcagcagcagatgatcaaccaactaccctctaggcagctaggaagctggcatctattctgtgctttgcctcctctgcatcttgagtatagaagcctgggttcagatgggtgggaagaggcaagaacgaatggttgatttcccaaaatactagacctgagtgcaaagatctaacagcatgaaaaggctgggtaaaactggtgagagtaacagccactttgatttactagttctgcttcaattaaggatagggatttgcaaagagactgttatatttgatatttctttgtccgtttcattgacctagtcttttttttttttttttttttttgacagttttgtttctaattgttataaaggtgaactgtggacctaggtccactgaaacatcttgatttatgataatgctttattttattttatttacttattttttggctgtaccagtcttggaacccatgccacagcagtgacagcaccagatccttaactacctgagccaccagggaactccctggattcttgagccttgcagcatgctcgttaatgcccatggtatctgtgatctttaccctgagagatttcccattgtccattattcagctgcttgggagtagacctagcctgagcatgagataagtgatttctggatgttgagattcaccctaatgtgtcttccgtcgcttttttttttttttttttttcttttttaaggccacacctgcaacatatggaagttcccagactaggagtcagatcagagctgcagctgctggcctactccacagccacagcaatgcaggatctgagccttgtctgcgatctacatcacagctcacagcaacgctggatccttaacccacagagcagggccagggatggaaccctcatcctcactgatactagttgggttcattgccactgagccacaatgggaactccttttgtttccttttctatggctgcacccgaggcatatggaaattaccgggccagggattgaatcagagatgcagctgtcagcctacaccacagccagggcaacacaggatctgagttccatctgtgacctccaccccagtttgcagcatcgccagatccttaaccctctgggcaagaccagggattgaacccttacctacagggagacagcattgtgttcttaacctgggagccaccacatgaactctgccctaatgcatcttgacctttttctttcagctgcttctcaacctgtctatgatgtgttaatacagaacctcagtaacttgactctcaacccaaggacaaaatttctatccataaaatcagaaaatcgacctcaaccgactatccggaggcttggtgaaggcatcccacctcaaccaactggccggagacttggtgaaggcatcattcctaggaggaaaggggtgaggacgttgttaagtgttcggagagaaaggatggaatggatgattcggtatttcaaaaaccgctatggcaaaactcaggtgagttcttgtgctctgggtaggcagcactgccccactctgaggggtagggggccctcatataacctgagatgcaattcgccatgggcaaagtgggtgggtatctggttttggggggcaggcggaaaggccaataggcttgggttttctgaatgtccaggaaattaggagccatcagttcatatttgtgctttttaatatattcttaagcagttttaggtctccagcaaaattgacagagagggaattctcttttggcacagcaggtgaaggatccggtgttgtccctgcagtggctcgggtctctgctgtggtgccagttgggtttctggcccaggaacttccacagatctcgggtgtggcccaaaaagtaaaagaattgaacagaaaggacagagtttacatatacttcctgatcccacacattcccagcctcctccgctgtcaacatctcccagtttctgctgggttacagggatgaacctacattgacatgtgactctcaccgaagtcttcagtttcccttaagcttcactcttggtgttgtgctgccagaaacatgatgctcaatactgtacagtaagaggccaaacaccagagcacagagtgctcagcagctggttgagtgtctcacatcaaggcacccagaagactgacacaagggatacatacatttgccctctttttttttcttccgttctttcttttgctttcctctctcttggctgcctgcctgcttccttccttccttccttctttcctttcccttctttctctttctttctttctttctttctttctttctttctttctttctttctttctttctttctttctttctttctttctttctttctttctttctttctcttttcttcctaggctaggggtcgaatcagagctgtagctgccagcccatcccacagcaatgcaggatccaagctgcgtctgtgacctgtaccacaactcacagcaatgttggatcctcaacccacggagtgaggccagagatggaacctgcatcctcatggattctatttggatttgtttccccatgccacaatgggaactcccttctcctcttctctctcttttttttttttttaatttttttgtcttttctagggtcgcacccacggcatatggaggttcccaggctagggatccaatctgagctgtagccgccggcctatgacagagccacagcaatgcggggttcagccacatctgcaatctagaccacagctcatggcaacgacggatccctaacccactgagcgaggccagggattgaacctgcaacctcatggttcctagtccgattcgttaaccactgcgccacgatgggaactccctttcccctcttttcagttaaagtatagcagatgtacaatgttataagtgatatgtatgacagggtaatataattcacaatttttgaaagtttatacttatagttcttatacaatatcggctatattccctgtgttggccaggaatatattatttattgactgaaaattagcagctgttaccattacaaaatgacaatctggcattgcttggcagccatgcatttcagtcctgtcacatggcatccaccaaaaaatccccatttttttttcatttttttattactcaatgaatttattacgtttatacttataaaatgaccatcacatccaattttataggatttccatcccatccccccagttcatccccccaccccccccaacctgtctcatttggaaagcataaggaaaaaaccctttttttttttggtttttatttttttggccatgcccatggcatgtgaaagttgccaggccagagactgaaccctcacccccgcagcgacctgagccactgcagtgatgacatggctccttaatctgttgcaccacaagggaactctttgactttttagtattccatattccaaaggctatgctagcaaccaatattagactcaagggtcatgaatatctctttggtgtacaattagctttttactttcaattattaactaattcgtttcattcttttttgcagacaaaatcaggagagcagcgatttcggtgcacctgtacttattgcctgtataatagagatcctgctgaggataattatgaaaataattacgacagtaattaggatgacggtgatgacagtaattccaaggctgagtaggttgagcccacaacctcgttcttgtactatttttttctcacttgtaattgtagaatgatcatgaagcaacttaggaaagattgtgtaccaatatttagataacctagtaagttctgtgataccttttttcctgcatctctttttctacctccttaatacaggttactatgaggaatctatgtaggatgcatttgaatgacttgactgtactttagtcccactttgatttgacacaaagaagcactatttcgtctcaggttttgcctcttttggcagccccaagtctagaagatgaaacccagtatcaagaatgtgaagcaaattaatttgtgtggaaggaatctaaagaaaatgttgggtagtttggctagaacattattagagcagctattgcattgttagaaaaaatgttgatatactgttctaattttcagtagcaaatatattgtatatagaggatgatcttattaaaacctgagagatttgagtatctttaaataaaattattgttcttatttta

SEQ ID NO: 28 - protein, 150 aa, Sus scrofa
MDSSDVNPTRTQDSQMFVEENSQETPAASQPVYDVLIQNLSNLTLNPRTKFLSIKSENRPQPTIRRLGEGIPPQPTGRRLGEGIIPRRKGVRTLLSVRRERMEWMIRYFKNRYGKTQTKSGEQRFRCTCTYCLYNRDPAEDNYENNYDSN

SEQ ID NO: 29 - DNA, 7793 bp, Bos taurus
atggctactcttcatcccctacaaaagcagttattgacccaaatgtcaacttatgctttttgctaaaaacaaacaagactgcttttggtatttcttcatagtttcctgctacggagggatggggaggttggatactgaagaggagatgaataatgaataaccaaacagtagggcagccggggatcttctaccccgtggtcagcagttaatgttagggctctttgccagaattcaatacaaatttattttggggggtggagggtaccaatttataaacttgatttcagctgctccagaaatcaaaaagaggcaatggaattgatagtctaaaaaagaaattaaaattacagatccaaaatacacattcataaaatatcaatctattacactgcgtgtaacagacccttttttcctctttacccttactagcatccaaaggtttcagatgagtcaggcaaagaaaacctgctgttaattgggagttaatttatagtcagaaggaaactgccgtctcctccttgaactctagcactttaagcccagttcacaaaccagcagccatctctacaagcagagtttgaaagcaatggatttttcaggcaacctcaggaagacagaaccacggaggcgccttgtaaaatctctaccctacttgacagagggcattattactctctcctattagtcccctaataggactacgcccattcaccttatccttttactcattagtcatttacattaaaataggctggctgattggcttatctgttgtttttaggaggaaacaggagacttttactctcaccacggcgtgtcagcctgggtttttttcccccctttcttagttctatagttcttccaggcttttttggagcagtttgagcctacagcatcaccttccactggcacccaaagatctaggaggagcttcaagctgtgactagacttccgatggattcatcagaagataacccaacctggaccctagagtctctgaaaacatccatcgatgacgcttcccaggcaatgcaaggtgagctggggagagaggaggctgggtagggaaggttaagagcctacctttctgttttactgacttcagtcttttacagagaaatgcagttaagtaaatcctcttggaggagagggtggccagggagtgtagagccctcctgtttaaaaaaaaaaaaaaaaagccagattaacaggagaaaagtgggaactgtattgtttgctttctatgctcagaaatctgtcagtcttctaaggacatctgaacatgcaatcagagttctcctagaccagggcaaatagcatcttatgaaattagtactttaaaaaaatttttttttaattttgtttagctgtgccaagtctttaactgtggcaagtaggctctagttccctgatcagagatggaacctggacccagagatgtcccagcgattagtattttcaccagcattatattccaatcacgagttttaaaaatctctccttggagcctcacaggatcccagccttggcctcccagacctactcactggatttgaacacttcttaccctaacttccctggtggctcagagggtaaagcctctacctgcaatatgggaggcccaggttcgatccctaggttttggagatcctctggagaaggaaatagcaacccactccagtattcttgcctggaaaatcccatggacagaggagcctggtaggctacagtccatagggtcccaaagaattgtacacgactgagcgacttcactttctttcactttatcctgacttcggatggggatggatggtgtagggtggtggtgcacagatgatgtggagccaaccaacaccctctgggcagcccaggaagctgggtggatcctgctggcatctattctaccctctgcctcccctgcatcttgaaatcagtatatacaaaggggaaaaaaattaatgaagataatatctatataatatagccagcctttctcttttcttgaatttgccttcagttcagttcagttcagtcgctcagtcatgtctgactctacgaccacatgaatcgcagcacgccaggcctccctgtccatcaccaactcccagagttcactcgaactcatgtccatcgagttggtgatgccatccaaccatctcctctgtcatccccttctcctcctccctcccagcatcagcgtcttttccaatgagtgaactctttgcatgcggtggccaaagtattggagtttcagctttaacatcagtccttccaatgaacacccaggactgatctcctttaggatggactggttggatctccttgcagtccaaaggactctcaagaatcttctccagcaccacagttcaaaagcatcaattctttggtgctcagctttcttcacagtccaactatcacatccatacatgaccactggaaaaaccatagccttgactagatggacctttgttggcaaagtaatgtctctgctttttaatattctgtctgggttggtcataactttccaaggagtaagcatcttttaatttcatggcttcagtcaccatctgcagtgatattggagcccagaaaaataaagtctgacacagtttccactgtttccccatctatttcccaagaagtgatgggaccagatgccatgatcttcattttctgaatgttgagctttaagtcaactttttcactctcttctttcactttcatcaagaggctctttggttcctcttcactttctgccataagggtggtgtcatctgcatatctgaggttactgatatttctcctggcaatcttgattccagcttctgcttcttccagccctgcgtttctcatgatgtactctgtataaaagttaaataagcagggtgacaatatacagccttgatgtactccttttcctctttggaaccagtctgttgttccatttccagttctaactgttacttcctgacctgcatataggtttctcaagaggcagatcaggtggtctggtattcccatctctttcagaattttccacagtttattgtgatccacacagtcaaaggctttggcatagtcaataaagcagaaatagatgcttttctggaactctgctttttccatgatccagcggatgttggcaatttgatctctggttcctctgccttttctaaaaccagcttgaacatctggaagttcacggttcacatactgctgaagcctggcttggagaattttgagcattactttactagtgtgtgagatgagtgcaattgtgtggtagtttgagcattcttggcattgtctttctttgagatgggaatgaaaactgaccttttccagtcctatggccactgctgagttttccaaatttgcaggcatattgagtgcagcactttcacagcatcatctttcaggatttgaaatagctcaactggaattccatcacctccattagctttgttcctggtgatgctttctaaggcccacttgacttcatattccagggtgtctggctctaggtgagtgatcacaccatcatgattatctgggtcatgaagctcttttttgtacagttctcctgtgtattcttgccacctcttctgaatttgccttagtacctgacaatttcacaaccgggaatcttaatctccatttgcacaagtctgtgtaatttgagtggatcctgactctttaatatagttttgaattatttcacatgtatttttgattgctgcactcaggctttctctagttgtgggaagtgggggctattgtctacttgtggtgcgtggacttctcattacagtggcttctctagagcacaggcctctagttacactggcttcggtggttgtggtacacaggtttaggtgctctgtggcatgtgggatcttcctgggctagggatcgaacttgtgtccccaagattggtagccagatttttggtaaccactgtaccaccttgagacttcttgagagaagtctgaagagtgagtgtttaacagcataaagcctggtttaactggaatgggtaatagcccgtgtgacttactagttcttaaggatggagagagattatcacatttggggattctttgtctattgcataggtgtggggtcgcacagaatcggatacgacttaagcgacttagcagcagcagcagctataaaggtgaattgttgaaacttgtcacagtgaaacattttgacttgcattaatgctttatgttcctacagtcatattaaaaatcatccacacaaatgaaaatgggaaaactgtcaatatctgattttagctccatgtttttccacttggaatcatcttaggtacctccaatgcaggagatacaagagatgcaggttcgatccctgggtcaggaagatactctcaagtaggaaatggcaaccagctccagtattcttgcctggaaaattccatggcagaggagcccatggggcctacagttcatggagccgcaaagagtcagatacacctgaacacatacataaattgcatatatacatatgaccccatgggaaaacacttaacactcagaactacttgtaacagcatcaaaacaagttttgagaagaaagtgtttcccattatggtggattccaccaggcttaagggcacacacatgctagttaaccgcccatggtatctagggtctgtcttcactctgagcaacttcccactgtccactgttgtgagctgcttaagaccagacctagtttgggcgagagctaagtggcttctggatattgcagcttgccctaatcaatctttgttttctttttctttcagttgccactcaactctctgaaatgttagcaacgaacctcagtaacttgactctcaaccctagtatcaagttgccatatctaccagaatacccatctcaactgactgggcagttacctagtgagaaaacaccccataggcggagaggggtaagaacggtgttgagtgagcggaggtacaggatgcaaaagctgattgaatctctcagacttcgctatgccaaaggaattcctcgtgtgagttctgggtaggcagcactgagccactctgggcactcacagatatcaagatgtaaatattggcgggagggtgatggtggtggtggaattacctggtggtccagcggttaggactcccaggggttcgaactctactgcaggaggcacaggttctatccctgggagggacctcaaagccctgggattcagccacaaaaaaataaataaatattgatgaacagcagcagtcactcttccactgtactcatgagtgcaggtgtgaaagacacttagggttttaagagtctctgactcctcttaggttagatgtgtggcactagtaatctgaattttgcttgatagcttgtaatatatgtctttttttcttcccacaaagtctgactctcaaagacaactacagcagcaggaggacactgaggtaagtagaaagtcttactatacaggtgggtgggcatctggtttgcaggggaggaacagtggcaaattggcttggattatctcaatcttcagaaactctggatcaatccattcatatttgtgttttaaaaaatatatgcatgtatgctaagttacttcagtcatgtccaactctttgagaccctatggactgtagcccaccaggctcctctgtccatgggattctccaggcaagaataccagagtgagttgccatgctctcctccaggggatcttcctgacccagggatccaaccctaacctgcatcttttatttctcccgcactggcaggtgggttctttaccactagcaccacctgggaagccctatatgtctacatctatagctacactctttatgtatatttagagcagttttaggtctctagcacaattgaaatttacttaactgatcccacacattctcagcctcctctgctgtcagcatctactagttgggtgtcgcagttgtgaacctacattattgttgtttagtcactcagttgtgtccaactcttttgcaaccccatggacggtagcttgccaggctcctctgtccattgaatttcccaggcaaaaatactggagtgggttgctattcccttctccaaacgatcttcccaacccagggatcaaacccaggtctcccacattgcaggcagattctttaccactgagccacctggggtgctgcagtggtgaactgacactgacacattatcatcaccacctaaagtctgtggtttccattcagtttccctctcggtgttgtgcttgtgctttttcacctgctgtcacaaacatgatgttctataccaggtagtaagagggtgaatacctgtgcacagagtgtccagcaaatggttgagtatctcacatttaagacattcagagaactgaattcgatccctgaatttgacctgactttgattcctgggttaggaagatcccctggagaagggattggcaaccttctccagtattcttgcctagagaagcccatgaacagaggaccttgattggctacagtccatgggtcacaaagagttagacatgactgatagagttcataatacttcagagaactgaagcatatgtattcctatatatatatatttcctttttaaaattgaagtatggttgatgcacaatattaaaaagttaacaggtgtaagacagagtggttcacaattaaaagttctattacatttatctttataaaatattggctctgtttcctgagttgtacaggaatgtatttattgacaatcagcagccattacaaaatgacaatctagcattctttggcagccatacatttcaatttgttttttccccccaaagttttttggttttgacctttttttagtgttccatattccaaaggttgttctaacagccaacattacatttgtggtttgttaatatcacttgggtgtagaagtaatttattatttcaaattattaaccagttaatccatctcattcttttttccagattcgatcaagagtgcgaagattccagtgtacctgtagttattgccagtttaagagaaatccttctgatgataattatgagaattattacaacacaacatacagtaattatgccatggaatcgaatgagtcataaaccttattcttgtactgttctcttgctggtaattttaggatcattatgaagcagcctgggaaagattgtaccaatattttgataatatttattgtaagtttgtctttttcacttgcatctctttctaccttaatacagttttaacttaggaggaatctatatgtagcttggaattgaaatgacttgaatacacactaattccactttgatctgacaccatgaagtactaattaagtctcaggtattgcctgtttcttaaccctgaagttgaaactcaatatcaagaatttgaaacaaattaacttgggaaggaatgtaaagataacattggctggtttgaccagagcattattagtgtgttaaatagtaataaaattttttgatgtgctgtttcagttttcagtagcaaatagatgtgtttatagaagatcttaataaaacttgagacttatttgagtaactttaagataaatccttgttcttatcttagacttgtttttgctagctatgtattaaatgaataatacttacccccatcatgttctcaggatgtaaatatatctggtgttctaattttttttttcttttttttggcattctaatattttgtgatactgtcctgttgggaataaagtttacacatttgaggtaaggt

SEQ ID NO: 30 - protein, 163 aa, Bos taurus
MDSSEDNPTWTLESLKTSIDDASQAMQVATQLSEMLATNLSNLTLNPSIKLPYLPEYTSQLTGQLPSEKTPHRRRGVRTVLSERRYRMQKLIESLRLRYAKGIPRSDSQRQLQQQEDTEIRSRVRRFQCTCSYCQFKRNPSDDNYENYYNTTYSNYAMESNES

SEQ ID NO: 31 - DNA, 32284 bp, Mus musculus
cagtggataagttgtagaagtcagttctttccttcccttactcggacctcagggatcaaactcaagttctcaggttgccaggtacatgtcacctgtctttgctttattattatttagttctggcttttgagcctaagtgttatgttacataggttgaccttgaattagctatgcactgaggtcctgatcctcctgcctttatcttccaagtaatggttacaggaatgggccactggacctagcaagtgaacctacctggtcactccaaaaatgcacagcaaagaatatacgtttaaaaataggttcattttaggaagtttgtccacattttaaatgacagttctgttaaagtatactgtgttttgtcctttgttaaatgtgacttttaaaagcaattcaccttaatagcctgggcgactacagtgctcactgtataaatgctagtgtgtttttggtgctgaaacagaaaggtggctctagaaagctggagttcctcatctttaagttccagactgagatatctagaacttcttcaaaaatccagggaaaggaaagcgatggaagtgaaaataaaaacaagaacatgctttacatatatttgattgtgatccctttggcgggtactaggaaaaccacggatggaattttccttcttgaaagaggtgaggagcaggcagaatgtgaacatctacttaatgagctgaactggccggtgccctcagaattgtaaacaggttcaccacaaatccaggccttggcaaacagaccaagtcttcctctcttcggttttctttttacagactggctttcttgacaacttcaagatggagtctcatccttgccctttttatggagaggagaagcattgcttctagttggttttagtagaggagtgaagtgcatttctcagatacaaagagagcacttgagacgttcagactcagaatggccaagcctggcactttgggaggtcaagaggaggctggaacggctgggagagaaagcaattagatgttccacccctttggtttttctccagacagggtttctctgtgtagccctgactgtcctgaagtttgctctgtagaccaggctggcctccacccagggatttgcctgcctctgcctccccgagccccagatttttatttttatttatttatatatctattttaacttttgaatgaacacaatggaattgatgagcccttggagagagaaacgggatgtcgtgcgtggcagccccggggatcagctcactcccacaggcctcacaggccatggagccaagaggcctccctgcctcggcctcggcctcggcctcaacaaaggtggagaacgcgcaggccgtccgtccatggggcgggaagtcgcgcgccgcggccgctgattggctggcgggcccggtcgcctgatgctatttgttgtccccgcgccaatgacgcagtcggcgtcccggcgtccgcccgcacgtgcagccgtttaagccgcgtcggccggccgcgaggagcccggggagcctggagcggagaggtgagtgggccggcggcctcctctgccttccaagcctggccctggccgccctcgccaggccccgctggccttgtgggcagacgccggccggaggctgcgcccgtgggcctgccggggtggtgggccttgaggtcggcccgctggggccttcccgccgccgccgccccgtggcttcgtgcggagcggagcgcgggtgtgaaggcctgaggcctgcaggggagggaggcccagggaaacctgcagctcagcgcctgggcggccatttctccgaagaaacggtgttggcggtgctcgggaagcgcttggccctacggcgaaggaattggggggcccgactcaggacaatttccccgcccccctaagcctccaaggcctcaacatcctgtctaccaacatcctgtgtaccatggcggggccacagtgggaaataccttgaatattatctcagaaaccacccgcccacctcatacgcagaaagccatttgggaatcctttcgggcagaaccaacagattttggggggcaaattggcacccctgggaatgtggggattgcttgaattgcttgattcaccaagcctatgaaacataaaagtgctggctataaagatcacccttaggcaagacggtaaaggctttgggggggtggttagtttagtagttgcacgtggtgagaagggacaaaaatatatttatatatatatataaatgtggtggtcgcgaaccctaatgcttcatttactatgtctttgacctagagcacagccccatagttgaaagatagcaattctgatgtgtgcatggtcaaaagtatcttttcttcttctttttttttttttttttttttttttttttttaggaacctgaagctatcatgggagatgaagattgggaggcagaaatactcaaacctcacgtgtcttcctatgttcctgtatttgagaaggtaatacaacttacagagttattaaaaggtgtggatttttatcagttaataaactggtgaggaagttgtaaatttttatagcctgtttcagtgtttatctgcatgtgatttttttacctatcttttatggggaatgagaaaggcaggctgagcttccagttggaatttgatagtaacaagcaaaagctgtactaccagtgtaattcaaatcgcaatgatttgagacttagaggcgaacacagatttgtacaattctgtttgaaagtcttgacagataagttgtatatagaaaatattgaaagtagtgatttgattttgggtggtactttgaattctgaaaagtaattttacataaggagctcaatgagaatatactagactatagaattagtagattagattttctgaacggcctttggggagttaaaattataactcaagaaggagctttggggtttcatcttttaatggaatgtattttataatctactggtttttgcagaagttccctcacattcagaattcccattttatgtggacatcagttctgattctaagtgatgatcttgtggaagcgcttattttataacaaaagaaaacatttagtgatttgatttaattggagttgattgatatgtgggctttgaattcaaatacctcaaataataatctgactgggtaatatttcttggcttggaatttattctaggtctagcacctttaatatgttatcttttaatagttctctttacatcataaaaataacatcttttggaagacaaattacctaaaagtcttgctctcccattatatacttagtatttactcttcaaaaaatgtacacagttttagtgatagttttaacaattttgatttttttaacttcactaattacgagtttattaatatttttacagcattgcattttgcaaaagaatgtactacaatatctgattttctttgggcgttttaagataatggtagcttttcattcttattatttgtatctattgcttgtttaatttggaatttttttccaaaagtgggaatgttggtccaaatgcttagaggacatttaatggcttgttgttccttctagttcttaatagatttgtataataaaaaatttaattaactgatgcagactctgctctacttggactttgaagggatctgtctgatttttcttcaagattttttattgttaaacactgtggagtgtgttgtgcatatatattttttttttttgcactgggtttctgaagttgggtggaagttaaaatttcataccttgcttcctctttctcttcctttcccttcagttctctttctctctccctctactcccctcccctctcctctcccttcctttaacctctaaatgcaggtgttaggggctatcaaattggcaggttgttaggtctttgaaatgtacctttttggaatctgtactttccagtaacataactaagactctggacattgagaatactaaattgataattacaccttttgatttaatatcgttatatggagccagtttgtagtaagtttcttatttatcttcagatttgatcccattgttggcttactattagtgacttggctttgttgacgtgagtgaacatgatcttgttcatggcctcttgacctttcttgaggaaaaagtgcagacaatggctaaggttaaatatcatttttatggaggaaaatctagtattttattcaggattttaagacgctattagatcccactgaattttcacttccatttttaatttattagtgcatttgatatagtcttatgctaatactatcttaaacagtatctgtgatcagacttttaatgagcattctctaagatataacagtatatgcttatatacgtagaaatgttagggtcgtgttctgatagctcttagtactccccaaatctagatttggaagtgaatatgccacctgtggctagagtaaaaggagtggaattatgaaggactgcttagcagcatagttgaggagtcacagttgctccacatgggcactctgttgacttattggggtgaatgtcttagacacttggtttgattactgtgcagtggtgctttttgttaactgactgggagaaattgtaaacacaatcctttctgtgtaaggcctgtgtgcctgtttggtacattttaggatcaaaaagttcctgaaattaaagtgaaaataaattgatttaatctctccgtaactgaaattttagtagcagtgatagttgatgagataagaaaatggtagatgacacctcaaagttaacagtaagaattcagacaaacagatatattcattcaaagttatttgtcgctacagagaatctttatgggttaaatatttgaaatttctctgttgatgtgtttgggtggcttaagagactacagtggtttgtagctaggagttctaaaggtaaatggttaccaacctgtgatttatgcagctgcagcatagtcttacttagtcctgtgtgctatagatagcgttggacatggtgaaatactttctatcaaaggcattgcactgtaggagacagaataagcacatttgagaacccacctaactgcatggcagagggagcaatacaactagagaagtgtgagtctgttatgttgaggtgggtttaatcaagtggacagggatggcttcctgaaggttctgactagtgatctgaggcagtctcagcaggacatcaggagcgaagatcccaggggagcaaacaccgtattggggcgttaggcaggcagatgtattagtttcaaatcgcgctgtaacaagccatcaggcaccgagccgtgtaaacagctgtcatcatccttgaagccagaggctgcagatcagctgtctgcacattggtccttcctctggagggtctaagagaatctttgccacttctagtacctgttgcgtgtgtttcaccaactgctgccacctctgtatgtatgtcctcttgtgtgtgtgtgttctctcttgtgtgtacttctctcttaatgacacccaggatgacaaattaagactcagctggataatctaggataactctatatcagaattcttatatatatccagattttctttcaaataagatatttattaattccaagggttagcagcatatatgggacaggagctcacctctaggtaaaaagctgatggcaattgatggctcttaggggagggagagtcaggtttttttttcagggatgtagcccctgagaggctacttgtcatcttctggctgtgctcagtaaggaggcttgcttgatgtatgtgctcaggggatttgtaaaaatcccagaaggtgaggagggaaacatggtggtgcgaggatagaggggatctgacgggcagggcatgggatttgatcaaggcacattagatgcatgtatgacattctcaagcaacaacaaacaccactgccatcccaagaggagaggctggggtcagaatgtatgagaagaggctacatttttacaaagcatttggcgtcagaggtgaatggaagctgggctgggcacagcttgaaggaagcaagggaggcagcagctgtgcatgatgttctaagggaggcagagaagtgggcagcagctggagagactgggaaggcagtctaagctaacgagaagggctaaaagcattttccttgtaaactattttgaaaaatcaaacttaagcatggatgagtaagagcagtagaatggacttcctaacgcctcagtccttcttacctgttgtaagcatgtacctattttcacacgttcccttggaatttgtaagttaaacatgcgaatattgagtttcatagcttgaggcatcatgtagtggtaaaatgttcagtttgctagtgcaggaatgtaccatcatcatttattggtttagctacattaaaccagtaagatttttactctgtttcactggcagtatcctgtctactgatagggctggttggatcattcttgttttggtatctggtagcaatcaatttgggttgttttattatagcagttttctcagggaattttagtgactgttgtggttttgctcttagtaagaactttggaaaataattggatggttcctgagctacataaaacttttaaaagttgtgtagtgtcttttgtgagagaaatttgagaaaagtattagctgaagataactactgtgggtgaactctctccaactttagattgtgactttgtattgcagtcatttgactctaatatctataagtttaggtcatttcatttttaaattacttgtattgtgttcttatatacatgaatttcagaggtatagtctgaaagtttttataagaggacgcttacacaagaagtaaaggagtgggctgatgatggaaggacacgataggtgctggaaatgagaagtaaaggagcgggctaatgatggaaggacactataggtgctggaaatgagaagtaaaggagtgggttaatggatggaaggacactgtaggtgctggaaatgagaagtaaaggagtgggctaatgatggaaggacactgtaggtgctagaaatgagaaaagtcactcacattgacttaacacagagaagctctgagaaataccgaaatcttccaaagttagcttggtatttagctgttcattttgtaacagaagttgaatctgctgagtcggttggttagtctaactctgccacaggaatgtacaggcgtctacagtttgtttttaagaggagaaacaggagcagcgagtatttgagattattgaagataatctccaaccactgctccctcaagattagttgacattaaccatgactattctgacccagtaggttattcaccacgtcattggatttgaaaaacagtccagaatcaatttagttttcagtagataactggagtgttctttaaagttgggttcgggatggaagcggagaaaactcacttcagagacagaatcttaaaatgaaaggatctgaactgagtccccgaagggagatggtacatttctataggatgggaatacaaagtaaaggggatcaaggtgggctattacattgaccaatcatattttgacacaaggggttaagcaaggaagttaacattggtgacttggccttaactgggtcacctggtttcaaggtccttgagttagcttttgcagccaggtcccctcctggactctggcctggaatttcagaatgataatagaacaaaggagtgggcaagctgtatgtagtcagttaagtgaagacaagcaacacatttacatgtgtggcttagttagataacaggatatcagcatcttccctctctatatcctttactggttaacagacaaacatgaaacatctgaagaagcagggtagaacatgaactcagctttgatcctgccagccaggtggaactcaggaagctgtgccctaacaagtgtaaacatattaacttattttggttaacttatttacaatggtagtgttttagaaaccatttttgagatagtcttcttatgtagctcaagctggcctttctcctcctcttcctgagtattagtcattcctagtcacaatggcagtcacagtaaagtaagtgtctttacctggagcctgcttctgatagctctgtcctatgttctactctactctgcagcattgctgagtgtactgtgacaccctgagctctgcagacaatagtgtgtattgtctctggcttatttacataataacagtttaaacttctcagtatgagtcaacaaacattttatgtacagtactagtctgcgaatgatttaggctttgtaagtctcaggcacagcttggctattatatatattgataccatacattaatgaattgctgtattccaataaaattgtttacagaaatgggtaccctaccagatttgtcctgtggctgtagtttattaattttaattttaatttaattaattttaagtgataaatttatgttacacgtacaaattaggttactgtgtcttggaataacaatgagaatgcatctgttgacctagaaaccctcactgtttactggtgttttgcatgcagttatacagtaatctctcttatcatgcagtgttacagtaaagtcataaaataatctctctttaactgcagttttgcttttcatggtttcagttataagttgctaactgtggcgtaaaaatattaagtgggaaatttcagaagtaaatagctgatgctttaaatttcatgtcattttgggtagcgtgttaaaacctgccaccatctccctttgttgtgcccaggaaagtcagccatccctttgtctggggcatctgtgtacacactcgctgtctgacatgatgggtttagggcccactgttacttagacgggctgattctcctgatgtatgtcagaaggtcacagtagcttgatcttaaaacgtctctgtgatccatcttgcttcatctcatgtaggtggcattagatcatgtcaccacaggaggagtgagcaaggtcagcaagggcttaacactgtagtgccataattgttactattctcttactgcaccaaattcataaaccttctcataggtgtataagaaaaagtatctcatatattttgtatgtatgaggatggggaagagggagtgaggcagagagcacgacatatatgcatgattatacgctactcatggtttcaggcacaaacagatgacatgttcttattattcagagtaggaaacttggctttctttcttacaggataaatattcttctggagcaaatggagacacttttaacaggacttcagcttcatcaggtatgtgtttaaggcaagatggcttttctttttagggtaaatagacagatatagagtgtttttacgttttctaatgagtactcattctaatttggatattttagaatagggtaacttgtagctaaagaagatacagtgttatagactgtattatttaatttagtgagttgctacaaaacttttttcaacctgaaggttgcatgtttgacttcaggttgctaaagcattgtccgtctcctgatataaggaagcaggatagatggtgagattatcaaagcaggttctaatcgtgatggctggccccaaacaacggattaagccagacttgtcataccattaagaacatgaatttttttttttttttgccccagaaaactaatttactgaagtttccaagagaatgagagataaggtcaaaacgaagtttcaacctattctgctgctcctgccccctctttctgtacagcttttcatctgggctgccctcccctgcctgtggactacctttactctatatagaatagagttaatgtatgtgctaacatggtaggaagggtaggagttgggctaagaaaaattagatcatggcagtgttttgttttgttggagcctgaaaccgggcccaaatgtgattgctgctgtgcagtgagagactttttaaattatggtaaagtgtacattatagtgaccatcttcaccactgatgtttttactactgtgtgtggatgctgcggcatgtgtgtggagttgggtctctctccacctttaggtgttctgggaattgaactctggatggtcaggcctgtacagcaagtacttctacttgccaagtcatcttgccagccctgatctttgccattaaaaagaaaagatttacttattatttatgtgtatatgtgttttgccaacatgtgtgtaagtgcaacatatgtatgcctggtacctgaagaagccaaaataacacgataggtcctttggaactggagttagagatggttgtgaacagccgtgtgtgtgtgtgtgtgtgtgtgtgtgtgtgtgtgtgtgtgtgtgcagggaactgaacctggctcctctgcaagagcagtcagtgctcttaactgctgagccattgctgcagccccaagagtctatttttttttatcttcactggttttaagtgtatagttggctggcattaagcactcacattgctacatcatctgctatctaccttgagatgtttttcatctttgcaaactgaaattctgttcctattagaataatagctcctcgctccttctgtgtccaaccctggcaaccagactactgtacttccagggagttcaagttgctgtctatgcatttgaactactgctcattttaaggaagtcaaatgcaaggcctgtgggcacatgagtttatcatttctccattcaagtcagaggatgcggtaaagtggcttacagccaatggaaggaactgttagctcactagaacttggctctaagtgaagacaaaaacacaaaacaaagaaataaaaaaccaactgtgccaaggtagtttgtagaatgtgagaggagttttgagactcggttgatgtaattaaagcaaatttaattcctatggctcctttaagttcaaggtaaatctgttgacaaaagtttattaaaacctttgctactgtcaaggagtacttctcccataaaagtttaaatgtatggctttaatataaccagaggctcaagagcctgcctgaaactgacagaaagctaatcttgctccctccgtatgaaggctgaggtcttttaaacatgaaaaagatgggtgtgtaaaagtgcatttgataatgtaaccagcagaaacgtggttctttgagctatcaacaaaaggcagtttcagtaaaggaatgaagtaggcctgtatcgtaagagagcgtagtgatctgttgtcatagaattttaaaaattagattgaaataaccacccactaaaagccataactattaatctatgaatgcttaggctaaggtaatgaatcgagagaaataaagtgcacctcttttggttaacaaggaattttttatagttcttttcaattaaaaatattttcaaaaccattttgagtatcacatgtattgtgtgttttgggtgggggcatgcatgcatgctgcagcccaggagtggagagaagaggacagctggcaggagtcagggtcagtccttccaccatgtgggctctggggctgtcaggcttggtgcacgtacccttactgacccattgtgttggtcctattttatgattgtaagtgtagcttgtggacctacttagaaagttatttccttattgcagcacattctagtcaagtgaatgtagactaaaaccgatagatacctacataattgtcagaaatttaaaagttagggaggaactaaataacatttcaaattaccaaattatccaacatcttggcctctgggtttgccgtccactgacagtgactgattcttttgtagatttctctatatatcctgacataattgtatcaaatttcatttgaatcttatggatctatattacatattttttgctgttgtggacacacagacttgcttgactctggttagctgtccttgctttctttaccttttcattctctcaagttatacttgatctggtttcttttcattttcccagaaagggaatcttattatgttgtctcttgcttttaattattgtgccctggttagtttttatcattaatttgacacagcctagagtcacttagaagagagatcctcatttgaagatttacctgatcatactggtctgagaccatgtctgtggagcaccttccttattgctagttgatctaggagggccagctcatggtggttagaaccatctacaggcagggtcattatagaagctactaacaaccacaactcacttttcagtcaggctctttgttatcattctccttcttacactagaggtggaacctaaggccccatgcatcctaagcaagacagagatacattcctagccctcttttaactctgtgattcaattttggtttgagaatgtatctcaatacatagatggctttgaacttatattgtagctaagactgttcatgggtcttttctgcttcagcctcccaagtagcttggatctgtcacttttcttgtcaagtaaatacaatttctctgttaagtgtgtggcacattgaaaaggctttaaatttgtatatttggacacatatttctatttgacttgctttgaagtgttgtttgctttagaaatggaagatgggccttctggaagagatgatttcatgagaagtgggtttccttctggaagaagtttaggaagcagaggtaagcgccatctttgtttagtcatctgaactgttgaataatggcacaggggcttggatttggtgcaaagctataagtctgctataacttagtggataatagattttgagttaattttttgtgtgtgtgtgattttgtttttgtttttgttttgttttgttttgttttgttttttgagacagggtttctctgtgtaactctggctgtcctataacttgctctgtagaaccaggctggccttgaactcccagagatccacctgactctgcctcctgaatgctgggattaaaggcatgtaccaccactgcttggcaagttaatttttatttaatgtcagggctgtggggcagagaaatgagaacaggtatgcccaactagctttaaactctatagtataatccatgctggccttaaacacaggctgctcataaactccatgtgtaatacagtacagacaaatattgaacttgggatcctccttccacagcctcctaagtgctgggagtggaggtctgcccaccacactgggtaatgcctgagtactttatgctgttttatctctctggtattataagacatagttaagtggactagacagacagattggtcccatagatcagctgctgcttaatttcaagtttctgtttctaggaattgatgtgagaagaatgttgtaaaaaccatgggagcttagggtatagggaacttgttgagtgttagctttcttaacaaaaagcagtatgggagatactcctgttagctcatcggtattaagtttaacaagttatttacttatttttgagacagggtctcttgtatctcagactggcctcaaatctgctatgtagctgagactggccttaaaattcttgtcttcctgcctccacatcccaaatgttgggttttaaaattacatttttaagctgtcaaaacttgtcatgtacactgtaattccagcacttggcaggaggattttgagtttaaggccatcctaggctgcatgcaaaactctttctctaaacaaacatgtgaacaaacaaaaaactaggaacatttgggtttagtagttttagagcaaaatacctttatttccccataattaatagagtttaatattaaagtgttgaaaacattttatactatgtttttgttataatgcaataacatggccctaaaatttcatgctaactcgagcctttatgagctttttgtctttcaagacatagcatagctaggactgtttggtaatttaaaaatatctcacacccatttttttctctttgtgcttcttttaatatatatgtttttaacctttagtctttgtgagtttcacatcattcaccccaaccccatttgtccctccagtccttcatgtctgccccctgctttttccagtccttcatgtctgccccctgctttttcaacctccccctccaaagaaaacagaaaataaaaataaaacaaagcatagaaaacatctcattgtggaagctgtagtgtatcacagtgtttcccccagtatacccctttccccacacatctttacttacagatgttcactgcagtgagtcactggtctggttttgaggcctctgacttctgctacaccatcaatactggatccttaccaggactcctcttgagtatccttttgttgccccgtgtcatgagactgctgtagctttggatcagcaggaccagcctttcacgtgctccagcagataatagatgaggtcttgggggtggcccaacttaaagccctggatctgggcctgggtgatagctaagttggtcattctgccagctctcctgggcaccaccagggagaactcttcagtactgccctggctagctcacccagtgctgcagctggaaaagggctggaccagaccagctctcccactctcacatcttcaggttggctcacttgtgccttcaccatcagggccagctctactgtgttgcccaggtgggtgcagggccagcccgctcttcctgtgctgcatgcagccagtgagggcagcgagggccagctctcctgactgcctcaggtgttgaggaggaggagagcactctctgttgcccttgcccacaccacctcacagcaggcaagtagccagctcccctccaccctgccatcagggccagctctactatgctgctcagggggaggctaacactcattcttaaatttatcttttgaaaaacttgattaactctttttctattgctatcataattaaggtatttcatttgacatttggaaaacctaatttcttattaatatataaacacaaatttgaattttatatttgagcatctcactactagttgttatgatatttaaatattaatgtatattttgtttttaaatgtttacatattaatgtacattgatggtttggatcatatagtggattgttgttttgttttcccattttaaagagttttactgtatagccttatctgccgtggacttgctatgtgaaccaactggctctcaacttgcgtgatcctcttgcctctgcctcatgagttctagggttataaacgtgtacaccacactaatctcaaccttgtaagtgagacaaaaggttcaaaggtttgctagctcctactgccagtggaaatacttatatcttagtattatatttaggagagaattaacagtgtaattatattttcaaactttgaagaggctgtatgatacattttgatgaaagcttctaaataataagagtagaagactatacttccagaattttttcttcttttagtgctaggattaaaggcatgtgatgacatgcctggcctaaatagtactttctcaatgagaaaagggccaatgtaacagattttgtcacaagttattttcatatgttttaggttgaaatgcatgttgatgttttaaaactagaactctgagctaggtatggtaatgcacagctatattcctagcagtacggaagtttgggagcctgtgggctcacaaccagtccagagctgcacagtaagatctgtctcagacaaaaccaaaataacccttctggttgaatggcaataactttaacaattatcttggtactatatataatctcagaagttcttctccttatggctgacctacaattttatatatagtttaatcttggcagtgatttttttgaacttgtataattcaatgtgtgttaatgtgcttttgatttgattcttagaattaaaatataacattgattagctttttttatccttcaaatgatggctgagtatctttaggtttttgaattacattacagttcataagatatgatgaaaatacttggttgttggcatatgtagttaatacaggcttttaggaattttgaagttttccttcaacacctctaaactggaatgttagagagagaggtaagacagtttgtagggaccacaggaaactttctcacagttgcagtttatagtaacagtgcatgctgatttggctgtgtctgttgttcttttctattccaggtagagaaggtaaggcgtgtgtgtgtgtgtgtgtgtgtgtgtgtgtgtacatacccttgcacgcacacccacacatatgctgaaaataaactgtatgagattctctcaacaattaatgaaaatactataaacaagaaccaactatcttccctgtatttctgaccttaagagtatttttctttttttgagacgagattcttatagtgttgttcatgttggttccagtctcttgggttcaagggattttcctacctcagcctcctaaggagctagcttgtcctaccaagcctagctggttcttaacttagtgggtgagagacacacggactattactaagaagagcccagagagtagcatgctgttgggaatgattagagtactagagaagacttcacagaggaattggtcttttgaagaatgaaaaattaaataggaaaaataggaaagcagggatactatgccaaaaggaacagcatatagaaaaaaaaatcctcgctatgttcacagcatgaaaatggagttatttagtgtgctggaaagttggctcatttgctatacgagtctgataccctgagttcagcacccaccacccacccccaactccaggctggaagaagagtataaactgaaagctatcttctgacctttgcatatctttgcatatgtgccatgacatacataagtctgcactcaaatacaccacacacgaacacacacacacatataccaccaccaccaccaccaccaccaacaacaacaacaaataattaagggtggtgtcgtacacccttaatctcagcacagagacaaatgtatctcttaagtttgaggccagcctggtttacctagtgagttcaaggccagctagggctacatgatgagactctcaaaaatagaagaaaagtagagtgctggcaaggtggctcacagataaggctgcttcctgctaagcccggcaacctgagcttggctcatcgtggaagggtagagttcaccctgtgatcttcaaatgcatgctcacacagagctcacacagagctcacacagagctcacacagagctcacacagagctcacacagagctcacacagagctcacacagagctcacacagagctcacacagagctcacacagacctcacacagagctcacacagagctcacacagaaataagtgtaaatgtttttaaagtaggaatcttggaagtgacagaggtattagaaaataaatagtaggacaataaaaataatatagaacagatttttcaatagtgaagattatcctgtgggctgaatataatgctttggtctgttgaggcaagggggatttagtacaaaggaatcatgaagtgaattcttgatagaaggaaatataatgagtagaatttacattttaccactagtaggtttatgatttttatttttgaatcataacttgataattaaagaaaaccttccaagtatataacttatttttaagtttgttttctattttcttaccatctgtaaaagtcgtctaaccctaaagcttaatttcacccctattttttgatgacataattttgcatattaagtttaactaaattttttcagatattggcgagtctagtaaaaaagagaacacatctacaactggtggctttggaagaggaaagggctttggaaacagaggtaagtacttgtaatgttttacaaccatacttatagttgactccaaggcttccagtttatttttttagaaaagaaagcacagaaagtgtgtgccatgtagaaatcatgaggctcatagaaagtggtttcatatgggcatagtgtaaaggcagcagcccatgctgtcctgggtatgtgcagtgttccatttatcttttaaagaagagtctcttcttagcgcatgtgtggaggtgtgggtggttagggggttgcacatgtactgcagtgcagtgcatgtgtggagaacatagagtgacttgtagccgttgcttctttccttcctccatgtgggcccccaggattgaagtcagataaggcttttgctgtgagcactctaacccacgctggaccattgctggccctccatttatttgcatttctcgtgctgtagcatcattgattcaccttacacacaagcctacattctttccttctttactccttagggctcccagttcccgtggcaattgatttcgtacctctgtaggggaacatgcactcgtctgtagctgagcaaggagagagtaatgcagagatgggagtttccctactcaggagctcagcactgactcttcctggtcacagaattgaggaagtgcaggcagccatggagagggcactagaatagatagaatcctttttacaagagctttgaagatatttaatttaatacttaggctttttgtagaaataatattctttttagggattatgtgtatatttagaaaggaaatacctgctaagggatttttttggtcaatcatacagtgaatacttttgcttttatatgagaattgtgtattaaacttccattatattttattgccacagagacacttaaatttggttaaacctgtagatgttccactacttgagataacacacataccatttataaactgaacaactgcctaagtaactggatggttcttatatgaaacaagcacagttgtaactgagttctttataatatagtctagataatgattgataggcattccatattgacatttacttttaaggtatgtgccccaagtatctcttctgtaagtatgagatagagcaggacagcctggggcatcccactatgctgcccaggtaggtatctcacccatgaacgcaagtgatacactgtaattagcttccagatacctagggctacagctatgcacacactgtacctagctccttgacaattgttacactaaagaacattttattaagagtcaagagttctttggagacaggtctctcagtgaacccagagcttattgatttggccagcctgcctgccccaggatgctcttgttcttgcttcctcagtgcgggaatcatagacagggaccatgtgtgtgactttgtcacagtgggctgggctggactcaagcccctcatgcttacattgcagccacgttatcaactgagccatccccttagccccaaatatattatttttgatattttgaatagaaagcaaataatggttatagtgatacatactgttgtcttgcccgtgcatataagggggaatataggatatttgaaataatataaaatctactgaaacatttttaaatttaaaagaatagagctaataatctgatagaggcagaagtttagtattatttgaattagttctcgtcctgtgtctgtgtatgtagtttatatagagagtttatctcattctgtagggtcatcataactagttgtccctgaaagactcttaaaacagatgttatttctgtgtatatgcacgttgtgtttctgcacacatcctctggaggttagtcacgggtgtcagacccttgaagctggaattaccggcattgtgagccgcctgacgtgagggatctgaaccctggccctaggatggagcactaagcacgtcactgttgtattgagccatcccgccagtcctgaaaactgtttttaaactatagcggtaaaagaaattctttcagaaatttgcagttctcttttatattttgtataggttttttaaataacaagtttgaagaaggtgatagctctggtttctggaaaggtaagttgtatttctgtgcagctttaaaaacttacaccgtcagaagcaggtactagagagactcagactggcagtcttactccgcttctaagttacatggagcagtttcatgaagcagctgtagagaccttaggcaagggtgtagataaagaatccaggcacctttaatttggtattttccacctgtcttagctaacctataaagtacaacctttggaaattgttattaggaaaagtaagtcaagagttaaactccactgtagggtacttgagttaccagcacacttcatgagctgagttcagtctttaggaccacatgtcagaaggggataactgattccagaaagctgctctctgacctccatgtgtgccctgtggcatgcacaagcccatacacacacaaatacacgcatgcatgcacgtgtgcaaaatttatttttaaattcaagtaagtctaagaggaaagtgatgagaaaatgaatctctgctcagagtaaaagcatgtctaaggtacccaagctctcaggacaagcatggtgagaacacaatgatgttatagaaggtcagctgctttactgtgtctgatggaccaggtttgtgtggggtcttggaacttgtatataaagtgcatctctggtgattttgagatggtttttgtttgaaaaccactaatgtatcaaatcttcttgacattgagtttcagagttctcagccctggttacctgctagtttagtggtaactaaagccagtaattcacgctaagccagtgtttattatactgtagaatggggccctccatcttatgggctagctattaagctgtcagtaaaagaacagagcatagtacaatttgtggtaaatatttaatgtcatttcttaattagatatttgaggtttgatcttggattagagcttagtggtagtctaatatacacaagatcctgggttccatccccagaatttggaggaaagagaatagggggcttattttactatatactttgattaccaaagtcaaaactaagattaaacataatctctaaaactttaagaattgagattgggtaatttgtagcttttgaggcatgagcttgcactgtagcccaggatggctttgaacttgtggtagttctcatgccttagccttctgagtgcagtgccgggagtatgagccaccatacccggtttaggattggattatagttctatcaaataagacagtttcttccaaccattgcttttaaccctgtcccattcaaaagaaaacatatataaaggagaattagtgttcaagaggaaaacttttaaagatttctttagttttgaatacttttgttttaccctattaatttttaacctacttactggttatattgtgttttctgtgttattctgtgttactgtaataaaagcaacttaaggaaatttattccaagaaggcaatagtctgtcatgggggtgcatggcagagggagtgggacatagctggttccgttgcacatacaatgggggggggcagagaggcacccagatcacctttcctgtcatttttattcacttcaggactctagcgcatggggtagtgagagccacatgggggttgagtggatctctcttctcttctcttctcttctcttctcttctcttctcttctcttctcttctcttctcttctcttctcttctcttgaaacagtctcacagacatactcagagttgtggtcttacatgattctgaatccagtcaacaatgaaacctaaccatcatcataatcaagataatttccatctaaacacaaagtttctacatctcccagttgaatcctttctagcagtgggagatcaaataacagcagagcataaattccaagttttcattatgctaaagagtgctttctcaaaaatggaatttgcttttgtctatttctgttttttttctttgttcctctcagcgaagacaaatggcacatatggatcaagttccttcagtcctgcaggtgtagacaaatccaggaatgggttttagatgaccgagcaagatgtttagatgttgcaaggtgtgcttgtgacacagccagtgctttatggctctgtctcgcttggtagagtgtaatcctaaggaccacatattttggagttgaatgcctgaaatttaagacccagatcatcctcatggtggttgtgttgccttaaaaatggtatttaactttttaaaaattgtttttctctgtttataagatgaggattatagctgctggacaaggtttttctgagagttaaagttagtacagcaaaactaaactgggtgtgatagcttgtcttctggtcctagctcagggaacactaagaagatcaggccaagcttgggtctcatctctttaatcccagcacttgggaggcagaggtaggtggatctctattcatttgaggccaatttggtccacatagagagttctaggacagtttagcctataaagagagattctgtcttaaagaacaaatgcaacacaacaaaataaataagaatatccttgtgcctaggagtttatgaccattgtggcaaatgtagtcagactgtgacatagaaaggcagaaaggagagagtgcatgaatgagttatccctttagagcagtgccagttgcatgggttatgcaggacattgtttacacgctatgcaattgttaggttataactatttaattttacttaatttcatttttactctctttatcttctagatccacaaaggtaactttttattttaaacttaaacttacttctaaaatggttatattcacaagaagttaaaatatagtatagaattggttttcatccaagtttgcctaatgccattatgttttaaaatgaccaaaaaaaaaaaaaaaaaaaaaaaagaatgacaaaaagacatccatatcctaaactgatttatacggtatttttcttaaagtagtatgagttagctctcacctctatctcagagtctaaaaatactttcttccccaattctctttcttaaatcttcttttcaagaaagttgtgttgattgctggcctgggtctgctgtcccactctggatatccaggcatcattgtaccctggggctggactcgaagggactaagcttagctgggcttaggtgggttagagggacctggtctgtgtgggtgcagaagaaatggccttctccacagacagttttgagggcaacagctctctttatttggggttaaataaggattatataaaccttggggagtgggtaggttttttggggtgtgtgtgtatcattgactggggttgaggtgttaggaatgcttcatttgcatgaagaggaaatccacatgttagctggacatgtccttacagggagaggaagtttaagctggaaactgaccaccaggctatgtgactaccctcagggatggaggcggtgtgggatgcaaggtttatgtgcgctggaacatgctggcccagagcaaggagcaagcaggcctattcccgccagtctcaggaggagtgctttggggtttggacgagtctcagcctcactcttgctctggactgactcctgcagttgcatgattttcagctcccacattagatgactctttttcagaatacatgctgactgtatccgagtcggtaaagagcaaataagttacttttacagtgatatcgatgactgcagatgcacagttgcaaaagagacatggaaggtttctgtgacaactcttaccattacctcaagccttcctacacccctcaaaaaattagtaacagcctagacaggaagctatcagagagaactcttaaataggatgctggggtttcaccttccacagtgaatgacttccagcagggatgcaggagggaaaggtctcagctccatttagggggcagagccctgagagcttgaccatacccccgtgaatatatagagaacacaaatgggacttttttttttttcctggggtaaaaagggtatgggggaggacaggaaagctaatgtgatgcaaatgtgctccgggtctatgatgtacaactcccaaagaaccaataaatataaaacatgctgactactgaggctcagatagtcaaggagtggggccttcagctagctatcaggataatgtttttaaaaatataaaacaaaacatattagttagacaggtactgtaggagtttagatgatagcccataagctgtttggtcacttgactttctgtttgaagttcttgaatactggacaccagtgacatgtgctagatatcttgaggctatctctgtattccccaaataggctgttttagaacttctgaagagcttagagttatattaataatataaaacgtttaaagtttaaaaaattgtgcattccttgctaccactcagcactaggaacataaactctgggaatggagcttagacatttattttcacccattttacttgagtatccatcagtgttgtgattggtcctcataccactgttcagagaagccctaaaaggatagttgtactgacattaaaacagaaaagctgttgagttatttgagttaattaggaaaaatgaggaaaagtttgcatggatgtaagaaagcacaactgtctagcattgctaagaatggtaaattatagaaaatgacatttttaaatagaacagtcacttgtctctaatagcctacgaatgcttttctgaaccatttgtttacttgtggacgtttttcattttgtactgttttgtctagctttgtggtaagcaaatagtgggtgctcaatcatttattttacattaaatattgatattcgtagatatactgtatagggaatttactctgagcaatgtttttatgttcccagtaaaattattttaagaatcaatgtttatattcaacttgaaaactattcttgttacagttatgttcttagctcttatgtcattaaaattacctagatgcaattcacatctttgtttctatttaagagtctaataatgactgtgaagataatcagactcgaagcagagggttttccaagcgaggtggtaaggacaatgctttgaacaatttgtttataagacaaaaataaatggacaaaactgactttagaagggccaaaagaaaagtaatgaaaactttaataaaaatatgttgatacatgcttcttgctcctgatacacgagcgactatgtgtagctccacttcttcagttctgacattggagatttgttcttcccaaggatcttaagaatgtcgtaatttacaaaagagggatttctggtgttttgatcagtcacaatttagataactgagaatgtgtttgtctctgaaaaaggtcattagatctttggaagagacaagaaattgcacaattttttgttcagatctcatgataattcactacactttgttaattctacctataacaaatatgaggtgacatgttatagcaactatcatccatatttcatgaatatatagggagacttgttaaaacagcagtagaaatacctgcaaaagagaaagggaaagcccagtgaattaggatagagtgtgcatctgtgataaaggctttcctgtttggaactccatgctggtgtgacttgggagaagccctccttttgcctgtaacatagttagctgactgactgaacagcaggctctcctccctctctagcaaagctgtcactcaatttcacattgaagaaagtctgtctcctaagccttataattctgcaaagatgtgatagtggggaaataagaaattaagtacatcttttagaattgcttgttttaaaaagccagtgctgggccctgtgccccggcttccccctgctgagctgtgtcccctttcctttcctttcctttcctttcctttcctttcctttcctttcctttcctttcctttcctttcctttccttctctctctctctctctctctctctctctcattttttttaaaatttacatttcaaatgttatcccctttcctggttttccctcccaaaaataccctcccgctatcctcctccccactcccgctgctcacccacccacccacccactcctgcttcctggccccagcatccccctatactggggcatagagccttcacaggaccgagggcttctcctcccattgatgtctgactaggccatcctttgctgcatatgcagctggagccatgagacccaccgtgtgtgctctttggttggtggtttagtccctgggagctttcctgtttcttacaaccagttttggtttggtttggtttggtttggttttgacaccaactgtatagaaagattgttacattttaaatattctgaatgttttctggagaatggtgaatatctttgtgttaactttaagtcagattaatttatatatcttcttcttccttcctttcctcctcttattcctcctctttctccttctcctcctcctcctcttttttggaggcagggtttctctgtgtagccctggctatcttatttgacaatgtttatgaaaatagttcctgcttagaaaaagagaagttcatgaatttaaaaaataaaataaaagcgagtaagttgatagactttttaaaaaaatgtaaataatttaaaattattaaatgaaaataacaattaacatatagacagttgacagattaaggtctagggtagctaatagttacttaaatttgaattttctttgattggtctttggtggtgctgaggataaagcacagcttctcttacatgctaggcaagaattctgcaattgagccagatctctagcccatgaatgcacttttacttagctctgtgttattttaaaagattttaaattttaaaatatacaaaatctactgtcaataattcaacatataggattttggattttagtaattattgtgttataaatagtagcaaatgcataaactaaacattattttctatgtatttttaccatttgaaagtgatctacctttgcattaaaggaagtcacacttgtcgtttgtaacaggaaagagactttacatggacctgagttctgggattttgttaaagtatcttagttttttatagggggcaaatataagcttggatttatttaatctggtactacatagtagaaatctagctaatggtgtagttgtgacaacttactgtgctattcaagcaacatgtgtcttttactcagttttgagtcttcaatgcctttttttgtcatagcaatatctatatcagttaaggagaataatctatagtcagttgtgacttttgaaaagtttaactgttttctttaatttagattaaattatttaatctaaatattaaatatttagtcaattctttagtttagattaaagccacttgaatcatacaaatgttaaattccattaccatgtctccaagatgcctttgttgttgttattttgtgctgttgttgtgtgtgtgttggtgcaggctgccaagatggaaacgattcagaagcatcaggcccgttcagaagagggggaagaggcagtttccgaggctgccgtggaggatttggtctaggaagaccaagttagtagtggattgcataagaaagggttcatttgttggaaattgtttttaaaaagttgctgtgatacgaatattttagtagagtagcagacaagttaccactccatatcatgtatcactattttcagaaacatgggtaactgaataataacttggaacacttatttcagaagtttgtgttagttaccaagtctttataaagcattatatattactaagtgcctggaggctggaaactatggctgaccttatgaatgagtggtcttctgtatggctcccccttcatatattctttcacaaacaacatggctttctatttcaaagtctgacagccaacggtttctagaaagaaagtattatttttcataaatcacatagaatacatgtgtctctcaatagtaattttgtaaactaatgacactgataaattttcaatactcattaaataaatatataaagttaaataaattgcccttcatttaaaaaactgtacaggcctctgaagggcagggctgacagtgttaaactggcagtggtgggagtggggctgacagtgttagattatggtaggaggtggggcagggatgatgttttggtgaacaggcagtgagacaatacagtgtggtctctgcacaataaaagtcccattttggggaggagacttttgtttggggataacattgaccctaacttatttataaaataacattaattttgaggaagttatttgtaattcaagtatataatttgtagagaaatcctttctgtgacacttaaaatatatatattgtgattcttgttatactattttacacatcttttaacctgtaataccatgcttggagtaaaatgttgttaaaagtaacacagtcaaattctgtttctttcaaataaagatagtgaatctgaccaagatcaggggacacagcgtggtggtggcctttttggttctaggaaaccagcagcaagtgattcaggtgagaaatgaaactattactgagctttgatattcatatatgtttttatgcttttagcaagagggcatgtttaagtatatctcaaggttagctcacaatttcccccgaggcttagttatgtaggcagaaatacacgtgtgtagttttgcctcccttagaacagtggtgcacgatgaattaccttttctgagtgggctgacagtatgagatggcagtagatatttattgggaagaaggaaaaaaaggcttgcattggtttcaaagaaagtttctgaggtagagggggaaatgatatgtatggtttgaggtgaaatataaaaaaaaaattacaagtgtattacaattacaagtgaaaatgccttaaaaggggtacagtttaaattaattctaaattaaaaaaatcaaagggcctaggaatcctgttgagtgactattgaatacagttcttctcttgtgtatctgaggggaaggggagtcgggaggcgtgtttcctctaatgtgttgcagtgcaatgtcttacaggcaatggtgacacttaccaaagcagaagtggaagtggtcgaggtgagcttacttgactgacttctgtcagctttcatttattgtaatctaagtctattttctttaggataaaagtaattgttactgtttctacacacctgataactatgaactttttatgacttgttcaagttccttaatatcaggttattttctttctggtctagcaattctattgtaagactcacaaatgataggagcatttgtaaacacatgcacaagagtgctcactgagttctctttatattaggaaacctgaaaatcacctaaaattcatcaataaatatttaatataaccacaagtgggatatcatgtagatattaaatatcgagatacttgtacaaattattaaaatacccctttccgttcataatctaagagtaaaggaaagataaaaaatgtgacttctttactctcaaaaaggtttttccccagagcataaatacttaagtattgtatgaaatttaaaatacttttcaaattagtagatcaataaaggttacttgagttttggtaaatcattagtctaaaagcattcaaagtattgaagcccctgccttcttacgttttccaatattgaacaaaaatccatttaaatcagatcatccctgatgtttacagcttgtctgaaggaggcttggatacattgaagagttgagaagcctatggggacttttgaagtgtgactcaaagcattttgcagtataagttggccatgagtcagagaggacaaagggatacaagacaggagttcaaaggtgatccatttaactgtcaagttgacaagggataggtaatattgccaacttgacaagatctgtaatcacctgggagccaaccttgtgtataagggattttctagactgggttaagggaggtgtgaagacccctgctgcgtgtgggcagtacaattccacagcctgggatcctcgaccgaatgaaaagcagggtgagctgcccgcctgccttctgctctctgtgccctcacagctagcgcatgtggccatctccctcaggctcctgcagccctggctgctttgccataatggactgtacccaaaaccgagccaggattaattctcgcctccttcagctgtcttttgtcacaaggaaccaaggttctgcatcccttactctagtcagatgaattgcttagctaactttggagtacttggaattgggacagattgccattcttttaatcaataagagtaaatcaccgtgccctaaatatattatgtagtttatgctgaatactgcctttttctgtgagggtcttggattttatgctatatgctaggcagaaggtacagaagttaccaactttcaagtgaaaattctggatgagtctctgaagtgctctggtaaatactgtgttgttaaaactctaacaccattcgagacgactgggcagcttgactcatcatgtcccactttcttggttgagtatgctccttagtaattcactttagtaccatagctatgacgatggccacaatctgggtggtcctcgcagaatcatggatgctgaaatggtcttaggcacttcccaacacagttttagtttcttatagaaaattatttccttgctgatcagggcaaagatctcataggttaaggaaagacatagcgcagtctgcattgcacataaagccatcatgttgattattaaacaaccttaaagtgtgtaagattctctctctacctttttcccatcttatttttctcctctccctcctttcttctcatgctggggattgacatacccaaggacttgtgcacattaaattaacacttagcatggagatgtgcctgtagcctctaaccccacttgtaagcagtgactttaaagatgcgttctgctttaattcagtgagagtaaagacatgcccagctttgcgtcataattgattatcactctggatttctttaataggtggttacaaaggtttaaatgaagaagtagtaacaggttctggaaagagtaagttttattttggaaaaagattttgatctttatagtactgttattttattcctcagttaacatttgtctttctggttttatccctttaagattcttggaagtcagaaactgaaggaggtgaaagcagtgatagtcaaggtacattggtatttgcactatctagctgagtatgcactgcatttccctaaagtcgggaggcagaggcaggcggatttctgagttcgaggccagcctgatctacagaatgagttccagaacagccaggactacacagagaaaccctgtctcaaaaaaataaaaaaaaaatatttaaaactttagttaaattaaaaacatttgcacaatgaaaatcttagtagttattacagttataatattaattattaataatcttaacagttattttctatttgggtttgtctgtttttgttattttctcttgtttgtgcgtctagtttgtaaattatattttttatttacatcccaaggtccaaaagtgacatatataccccctcctccaccagaggatgaggactccatctttgcacattatcagacaggcataaactttgataaatatgacaccatacttgttgaagtatctggacatgatgcaccaccggcaattttggtcagtgtattatttctatcttgatatacatgtatggtatgatgaaattgctatcaatataaaggttaccttttccatgctgaggatccttgaatgacagttgagaggcattgcttaccatttcagttggattgctgtatcaaaagaggaagtgctggaattcatctctattccccataccatattaagaactttgtttaaatttatggaaaaggctactttttctagatactcaaaatgttcacatcctaaatatgtgagaaaagtagctcttaggatgtggattttatgtgtacggctgttttgcctgcatatatgtctttgtattacatgactgtcttgtggctgtaatagccagaagatggcatcagagcccctagaactggagttacagatggttgttgtaagtctttgtgtggattctgggaattgaactcatatcctttggaagagctgccagtgctctcagctgctgagctgtttcttcagccattcgaggtgggattttgtatggagaatagcagaaatctcctattgcctgttaattatcttcacagtaagcactcgttacttaccagagctttctgtgtctcaggatttatgagggctgaaaaagtatttacaaggaatgtttatggga

SEQ ID NO: 32 - protein, 728 aa, Mus musculus
MGDEDWEAEILKPHVSSYVPVFEKDKYSSGANGDTFNRTSASSEMEDGPSGRDDFMRSGFPSGRSLGSRDIGESSKKENTSTTGGFGRGKGFGNRGFLNNKFEEGDSSGFWKESNNDCEDNQTRSRGFSKRGGCQDGNDSEASGPFRRGGRGSFRGCRGGFGLGRPNSESDQDQGTQRGGGLFGSRKPAASDSGNGDTYQSRSGSGRGGYKGLNEEVVTGSGKNSWKSETEGGESSDSQGPKVTYIPPPPPEDEDSIFAHYQTGINFDKYDTILVEVSGHDAPPAILTFEEANLCQTLNNNIAKAGYTKLTPVQKYSIPIVLAGRDLMACAQTGSGKTAAFLLPILAHMMRDGITASRFKELQEPECIIVAPTRELINQIYLEARKFSFGTCVRAVVIYGGTQFGHSVRQIVQGCNILCATPGRLMDIIGKEKIGLKQVKYLVLDEADRMLDMGFGPEMKKLISCPGMPSKEQRQTLLFSATFPEEIQRLAGDFLKSSYLFVAVGQVGGACRDVQQTILQVGQYSKREKLVEILRNIGDERTMVFVETKKKADFIATFLCQEKISTTSIHGDREQREREQALGDFRCGKCPVLVATSVAARGLDIENVQHVINFDLPSTIDEYVHRIGRTGRCGNTGRAISFFDTDSDNHLAQPLVKVLSDAQQDVPAWLEEIAFSTYVPPSFSSSTRGGAVFASVDTRKNYQGKHTLNTAGISSSQAPNPVDDESWD

SEQ ID NO: 33 - DNA, 32286 bp, Sus scrofa
ggttcctagtcggattggttaaccactgcgccataaattacttcatcctccatgtctgagtatcagactatgttgggacccatatttctgaaatattcagaagcttattcaaagtttcagggaatggaatattaggaaattaaaaccaaagatacaaactgcatttttcaagtcatcggttgctatgccttttggagggatgggacaatatggagggatttccccaaccttccgtgggacagaacaagaatatatgattgatgagaccataagcgctgaaatgatctttggtttggccagtaaccctaggactataaaaaggtgggccacaaacccaagccttcatgaataacctacaccagcacaactttcttcttccttttggatcagagggcatctcttccccatatgggcccccaactctgtaagacaggttactgtcttcacggctgcctgattatcggtgtctcagtctcaccctgccctcaccgggaggaaaaggcaatacaccacctccagcgacctcagccagacgtttaggcaccggggaacccatggatgttggatgtgaaggaagcgcctcagaaataaaaagccagagaggccaactgccagggacagcagtaggtaaagggagaggagagcttaaagaggtaggtgggaaggcattttattcctcttccatattttccttcggcttgctgagcttgcacagggaaatctatagcttctccagactgcggaccccacccaagaatctagggacaagtggcgcacggccagcctttacccccgatgcccaacgggccactctgatgagcccagcgcagccactgaagcctcaaaagccaacaagtagggtaggagtgggtggagatgggggcgggacgacgccagctgcctgagcactgattggctggtggtgctcgtcgcctggtgccatttgttgttgaagcagcgcacctgacgtagtcagcgtcctgcacgtgcagccgtttaagcggcgtcagagcctgcgaggacccaggagagcaagccgaggagaggtgagtggcctggcggcttttccgcggcacgggcctcgacccaaacccctgcgcttcccagtaggtggactttgggtcaaatgaagaacggattaggtgggcaggggttagaagccatcctttggggtcgttctgcttcctgctggagggtctaaaatcactgtggttgcccgaaggaaggagttggggcctgtagaggaggcaaaggcgccttttggccagccctgcgcttgttttcctctgaacagggatggttgcagtaacatttgtgtataaacactccttagtgaaacttgtgctgtgttggcggcactcggaccacctaactaccctacctctctctgctaaacttcaagaccttgcttgtttccctgccctgcttcctaaaaaagctaaatcaaaaaccccaagctaaatgtcttaccaacttttgaaggaggcggctgaagatagaaaccttgagtagtgtctgaaaaatttcccttccccagatattaaggccaataagctgtttggggaccttttgaggaagaagataaattctttcaacagactggggggaaagtctaagcatcagtggggacatggtgattgctaaaatgactagctaagtggttcaatagatttttaaaggtagaaaggatgaacataaacgctgtctctaggtaaggagcaaaacttaattgccctttttgcaaaaagttttggggaggatcaacatctagttgagtagttttgatgggcatatgtgaaatgatgaagagttatacttttaaagatacaactctgatctaattgaggccaaatatgcatgtttgtatttttataaaaatagaactggaagccaccatgggagatgaagattgggaagcagaaataatcaaacctcatatgtcttcctatgttcccgtatttgagaaggtactaaaatttacagttattcaatgctacagttatatcaaagttgaaaatcactgtgatggggaaattctaaattacataatctgtgtcagtaagctgtggttatcgccatgtgattgtcattaactatcttatggggagtgacaaagaggcacgataggcttcaaattgaatgaaatagtcttataatttcatatttaaaaactaataacatgtataatattaataacccaatttaaatctcagtgatttaggagttactgtgagtgatcacaagtttgtgctaatgtctctgaaagacatacacttttagagaaaatcaaaaaatataatttggttttggatgacattttgaattctgaaaattgtttttctataaggagcactcaagataaaaacataggctgattcagatggtaatatcagtttgattttcagatgtacaaatcatcatcagatctttttcctcaatagcatttgaagagttatattgtaatttagaaaaaagggtcatggaatgggtttttgggttttggttttgacttgaaaattgactttaaaaatgaacagactcttactttagaagtcaatgtattttaatggattgcctttttttttttgtctttttagtgtcacacccatagcagatggaggttcctaggctaggggttgaattggagctctaaccactggcctgctccacagccacagcaatgctagatccgagctgcatctgccacctacctacaccgaagctcacagcaacatcggatccttaacccactgagcaaggctagggattgaactcacattctcacagatgctagtcagattcatttctgctgagccacaatgggaactcctttaatggattgcttttacgtgttagctactttaaaatgtatccaaaagttgattttttttttttcccttttagaagttccagtttttgtgcgtgttagtcaattctggcactttctatttcaaatgctgtctttgtggaagttcttattttatcccaaaacataaaatatcctttatttgtcttaatttgattctgtgtgtatatatatgtaatttatattaaaatacctaagctgctaattgaatttatcatgtttcttgttttagaattttagaaatgacatcttttgtatgttatctttttatagtcttcttcctgtcataaaaatattgtaacactattgggaaaagggaagaatcactcatcttgtttactagtacacatgctctgttaaatttttagtaaattttcttctgtttttcccaaacatgtttttatatagattgtaatgatagtaaataacactaatttttgacttcaactttttcactctttagcattatttcatattactaatttcctacaaataatttctcatcattatataatatttcatggaacagatctaccataaaataattaactttgtgttggtgggaatttataagatgttatcttttcactttaatattgtcacgaaggagttcctgtcctggcgcagtggtgaacgaatctgactaggaaccatgaggttgcgggtttgatccctgcccttgctcagtgggttaaggatccggcgttgccatgagctgtggtgtgggtcatagacgtggctcggatcccgtgtggctgtggcgtaggccagtggctacagctccgattggacccctagcctgggaacctccatatgccgcgggagtagcccaagaaaagggaaaaaagcaaaaaaaaaaaaaaaaaaaatatatatatatatatatatatatagtcttgaatatctacagcttattctttgttttagtttgggagtacattttaaaaaaatggaattacttggctattggatattttatggttcttcccccccgattaaatagatttgttctaatacaaagtttattcacaagtacagactttcttccacttggacttgtctaatttttattttttcttagtgtgagattttgtcttaagtgttcttaatatagtatactgcactgtagcatattgtgtatattttttgcatagggtgtcagaaaacgaggatggctgtcagttttacagatttacctttttggaatctttgtgctattcattaacatatcttctttcttgatactggtcatactatattgaatattaattttatgttaacaattctaccttataattattagtacatatttttgtggggcctatttgtagtaaactttttgtgtttgttgccaacttaacacctggtgctacttgtgcaattagttatttggcctagttgatttgaaggaatatggcacaatcactggttttgtttgcctgccttggttgaataagaagtgtagaaaaaggatgaatatatgacctttttatggaggagaaatctgaggtcatttcttcagcatattttcttttaaagacaccattttgattgatctaaatgaatttctatttcaagggggtaagctggatttcccttttgctaaatttatattgggtctgaaaccatcttggattggtaacaatatctttggtcagctttttctgaatgcttctcaggatcgttatttggagatttaatattaacatcttacataattttgaactaataggctactgttctggtagtttttagaatttcccaattctggtttttgaagtgagtgtaccacctggtgataaaacaataaaaggtgtgaggttaaaagaaatttgataacctagcagtaacatactccagaaatctcagtggttaggtatttgcatattgcatacaagcttattgggatgagcgatgaaatggatgagtatggtgactgtaacaggatgatgggtttgcttgctagctgcagtgcatcttgttagatgaccctgggagtaagtgtacacagtggccatttatgtctgatttatttattttttggtggcacatttcagaaggcaaatgcttttgtgattaaaatgaaatatctcgagatgattagttcatccacaattattttattaagttgtaatagcaaagtttataataattaagaaaaagagtttatggcttctttcttcacgttcatactgcagttctgcagtagcagggaaattgtggtgctcagacattgttgggttggcagacctaaggaagttgaagtgctggagcctgaggaggatttccagcaatttctgctgctagtcatcaatgagatgtgagaagatagtgtatcttgtatttgagagtatggaaaaatcataaatgctgaataagaggaagttgtgggggatagaaaatatgtatacccaaatgaaaactgaggaaagtgctctgacttcttttcaaaatctaaatgatggagtcggggcagagtacaaaaactctgagagaaggctaaagggattgccaaagttggcagagatgttggtcacactagtctaaagaatagagaaaagtgaattctcctgaaggaggattggcattttatgggcaaagaattctagtcaactgatggagatagactgacacccaggagaatctgaaaccagagagcctttcgttttctcccctttttttcctctgtatatactctgtcctctcactaggtttcaggtacatggtaacctcagtgtgagttttgatagttacttccgcaaacaaaaacatttaacaattggaaagatgctcttgggtacagaaattagggcttagttggtaagtgtttgccacagacgtatttgttcctgggctttggtggtttctaaattttgaggagctttactcttgtgtgacatgataggttgctggaatcttaggtccgtgtgtgatacctgacactcagagttggagttctctagctctggaggtgctgaagaagctgcattaattttaggagatgactccacacagcagttgctggagaaactgaagaagggaccagacttcatttgggaatatgaatggggctgatttggcttggatcagaagaaggggtggaagatgatactgtctgtattttgggactttaagttctgttttaggtcaaaggaggaaagatgtattttgttcaaaatttaaatttcatgtggcacactatctgatgtaacatatctggtcagtttatttggaccatttaacttagctttatttgatagagaacctagaagaagagatgaaatctcggtattctgaccatgttgatgtagtattctgatgtaggcataaaatggaggatatttgcaaaggaaaatgtggggaaggagcatgtggaactttcagcataggtccataaactggacaggaaagaggcattttcaaggtttataagttgtccagatataaattcacttgagtagcagatctaacaagtatatgaagtcagaactctaccatgttttagaaaagccaacttaaccatgttaatagaagtattcacttgtttgaaaaaataaaatacctaaaaaataaaagtgtgatattctagaattgaaaataatgagtacaaagtaaaaagaaatgtgtttatcaaaatgaaaacagattatttgtaactagctccatatgagaaccattatgtttaaaacactttgaaatttctaaattggttcatttggatgggtaaagaagtatcagtggtttacagctaagtgttttaaaaataagctaatgtcaagatgtatgactcaaacaaatttttattaagccttattaggtgctggagatagtggtgaatgtgatagataagggagaaactaagggaacacaactatcatgaatgctgtgttttactgggggagaataagcacatattaaaatcaaatataaataatgaaaagtttgaaaaaaaatcaggaaatgtgtgtgtgtgcacgcgcatatgtgagagaaagtgtgattgggggtaaggtgaatttagatcaggtaaagaggaaaagcttccctgaaataattactcatgaacccgagacctgaagaagtcccaacatgtcatcatttaaaggtactgaggaggaaacaaacttggtaacaggaagaagtacaatgcattagtttcctatggctgctataacaaattaccacaaactagaaaattttctctcacagttctggagtccagaagttagagatcagtgtgtcagcagtgctgtcctccttcagtaggctctgggagagaatccatgcctcttctagcttggttataggcagtccttggcttgtggctgcatctctctctgtcttaacatggccatctctgtgtatttgtgttaacaccctttgcctctcataaggatacttatgatgacatttagggcccactcagataatccaggatagtctcctaactttagaatttttggttatatctgctagaactcttttttccaaataagataacagtttgcacattttggggattagaacttggtatctttggccactgttcattctactacagctagtatgactaagcacagtgaggtaagtcaaagttggtagaaaatgaaatccaagaagcaaagacaaaaggaggagaagagaaggatcatggagagagttgataggattgagtgggctgaactggggaatgagagagagagtggtatcaggtttttaaatttaagcagctaaatggatggtggtgctgtttgatgaaatgagaaatatgtgcaagatgaacaaatttgggaggaaaaagtcaagaattctgtattggttgtattcaatttgcagtgcctaaaaagcatataagtaagaatgtcagtaggttatatgaatgtattgcttaggaaagggatcagagttatagatacaaatttgagaattatctgtgtattagtgggatttaaagctgtgagattgggtaaagttgtatagagttaaacaaacttagagggctctgtcctaagctgtggggcttaaaggtacattagaggattagctgggaaaggagattgagaagggagtggccagtaggataagaggtaaaccagggcagtgtgtgtgttccttaagccaaaggagaatgttgtaaaaaggaagatcatttgttgtttcaaatgtttctgagagctccggtaggattaaatataaaagtagtaatttcattacataatacccttattataagctttttcagtgcagaagtgaggatgtagatagggtagcccgaaggaaaaacgggatatgagaacgtggaggcagcaactgtagacaagatgttttgtctataaagaggcagagaagtagtatagtaactggaagggaatatgaagtttatttttaaggtaataaaaaaggttaagaattttttacaatgaaagatgaattctattgaatgtttttgatgtcttatttcaaaatttgccttaaaatttgtaagtttcacgtatgtgggatttaaaatgccacagtcatgcgagttcccattgtggctcagcagtaacaaatccgacctagtatccatgaggatgcggattcagtccctggccttgttcagtgggttaaggatctggcattgccatcagctgtgggtaggctgcagatgctgattggatcctgtgttgctgtggcttaggctggcctctacagctcctgttcagcccctagcctggaaacttccatatgccgtgggtgtggtcctaaaaagacaaaaataaataaattccacagtctgatgattgtctaataataatttttcagttctatagtgccagagtgttttattactttttaaggctatataaagctggtagtgttataacatttataaaaccagcccctttttaggatctatttacccagtaatacttgaagcactagaaaagagaaggaagtcttcagagtttcactttaaataggggaaactggaacacttttcttgttttaatgtttatataattataaattggaactttttactatagtagttatcaaaagttcaagccatttcaaggattctattgtctttctgctttaatgtcagaaaaataattggttgactttcaaactttataaaagtagttttaaaagtcatttagtatcttttatgaaagaaattttagaaaataagtattacctgaaggtacctaccttggtgaactccctgcaggtttgggtttatttaaaggaacttagttgaagaaatattgtgactcttctagtgaagtcagttgtttaaagtatcatttataaattttaggtcaccttttgttcttaaattattgaattctgattgcaatatgcaagaattgcagagttctgttcagaagttttgccctaagtagaggaagcttatttgagaggaaataaaggagtggcttaatgataaggatgtcctaggagttagaagtgagaaaaaagttactcatgttgtcattaacccagggataccctgagaaatgtaggaaagttccagaattaacttgatagctattgattttataacaaaagttagattttctgagtccaacagccattatacttttgcaagtgtaatgcatatgcattaatagcaaatacattttgagactaaagtagggaaaataagatagtatttgggagcatcaaagacaatcttgaactatttctgtgtcaagtttgattgaaactagtcatgaatattctgaccctgtttctgacatccaccactttaatggatttgtagtgcacctgagagatgcctgtatagatacattgtttttattgcataagtgaggttttctttacttgagggttcttttttaaagtttcacttttttaaaatatcactttagtttcacttgatataaacacagttgaagattcagaaataaatttctgtggtgctttactatagaaattgttatctaccactctcttgtgctctacttcattctgtagaattttgatgagtttgctgtaaaatactgaactctataaactctattgtgtattggcaggcagtgatttattcatatatatatatatatttttgacctttttttttgactttttttttttttttaagggccacacctgtggcatacagaagttcctaggctaggggtcaaatgggagctacagctgctggcctacaccacagccacagcaacaccagatctgagccgtgtctatgatctacaccacagctcacagcaatgccggatccttaacccactgagtgaggccagggattgaatctgcgtcctcatgtatacttaggttcgtttccgctgagccacaacgggaactcccgttttatccatatagattaaatggttagattttatttatataataatagtatttaattatagttttcaagtatatgggtggctaaattttatttgaagtcagacatcagcaaactctttccataaagggccagacagtaaactttttagactttgcaagtcttacggcctctgttgcaactttgctattatagtgcaaaagcagccatggacatacttaggtgaatgagtgtggctgtgtttcaataaaactctctttacaaaaactggtaacctacaagacttggtttgtggctatagtttgctgaccactgttttaagtgatatatcagtgtgttatacatacaatgttaaagtgaaggtgtttggagtagttaataaaggaaaacccagtgacctagaaaatcttatattctataattattttgttctgaacaaagcccagttgttaacattttttagtgtttgtgagacagatgacacttttttattattcaaagtagaaagctagtcttttctttcttcttacaggataggtattcttctggagcaaatggagacacttataataggactccagcttcatcatcaggtatgtgttaaagtaaaaaggtgaaactgtttttcagttaagggcttcatccactggatgaggagcagactagtagacatcttgtagaggatgttttttaaagttcctagcgagaattcattgtaatttagatatgtttgcttgagggccactttctcactaacaaaagggagagagaagagagtgtagtgctgtagagtatatcatttgatttagtgggtttgctgtaacctgagcccaagcttggaatttgcatgtttggctttcaggctgctaaggaattgtcagggttcctgatataaggcagtaggagcttgggctttgtaagatgttgaagcaagttgcagtggtagtaacatgcccagacaacaactttttaaatcaaacctgctgtactatcaaggtaatatgagatatttttgggatctgagaactaatttaggggcgatctgaggcaaataagagaaacaaatcaagatatggtagctgctgcatttcccctattccttgtttccatctaggttgcctgcatattttacagagttgatgtggatgggaagatgggtagaagtggtaggacttggactacagagttaagctcatagcactagtcttcgttttgttgaagtccaaagcaggttgaaatggtatttctgctatttttttccaattttttagattgtaaaatacatgtaacacacaatttaccatagtagctgtttttaaccacagtgacattgctgtgtagccaccaccaccatctacctctagacctttttcatcttctagagctgaaacttcatacccattaaacaatacctccccaatcactcctctccccagctcttggaagccactgtttactttctatgaatttgagttactgtgaatttactatgagtctcttatgaaattgagtaactgctacttttaagtcttactctagtgcaagagaaaggacctggtaacactaggtagtttcatcatttctctcattgaaaattagtggatgagattaaaaaaaacatagtcaggagagctgctggcttactgaagcctgacctaaagtgaaaaaacatgtgtagacatagtttctaaattgtggaggggaatttgaaagttcatcaggctaaagcaaatgtaattcccatgttcagcttaagttcagagtaattctcatgatagaagaaagttaagtttagaagagatgcttttgctgttgtcaagatgcatttatctcttgcatacatttaaatggaacagtttaatatagaatatattttcaaaagtttatgaaatattcagatttcaaaaggctaaccacatacatgtgtgtacttgaaagagtcagaaaagtaatctgtacttcttaacacatctatatgcttagattatggtgtaggtaggagaaaccttgttttgtgaggcatcaaagacaatttttgtaaaggaatgaaagtttgggtctatagtgtattaaagtataacactactttgtggtgaaatcatcaagaagctagattgaaatagccaccagctaaaagccaggacttccttaacattagatgtcaaatgtccgggctaataaaatacagtcaagtaatgaaaaacatagattacctgcttatcttctggatagcaagtatgttggtagctcttttttaagtgaattttttcataaaaataggttttcttattatagaaatgaataatctactaaaccaatacataaatattcttattgcaaaaaaaaaaaaaaaacaaaacaaaagtgaaaaacttaaatacagaggtgaaaagaaagaaatgatctggaatcttggctcccaagtttagccacctttgacagtatgctgactgaatttttagatttctgcttgtattcccacatacgtaattgtatttcactggcatatttgtacgtgttactttttatcataaatacctgtcatacttttccttggcttacgtgctcttgtcttctataccctttccaggatcttaagatggtatttaggcatatctcttttcattgtctgttcacagcagtggactctaatactacatctttctttcagtctcttgtagctaatacatttttctaagttaactggtataatctaattcttaccaaaattcagtgaggaaaattcatgttacctggtttaaaaatgtccaatggtaacttcacagcttataattgaaaacatttagtcccctttctcgtcatttgacttcctagcatgcaacctgagcacctatatacacctaaaagatgcaaccaatcaaccatcttttccaagatgaaaaaagacttggaaaatttttctggaaatttctgaaaagcaaaacttgagtttgccctcaactagcaactatttacatagtatttacattgtgttaggtattgtatataatctagagatgatttaaagtatgtggagggtgttaggttatatgtaaggactatgccattttatatgagggacttgtacacccagggattttggtatccctgggagcaggggatgtgtggaggaaattaagggatgggtcctggatccagtccccctctgatactagttttaagcttctccccttccctggcatgccctgtttattacttcttcccttcctactttcctaatggttaccacactttttgcatgaaaatctatattcaatttttatatcatggctgtgtatatatcatttacttatgagccatgtaatatattatggttacattcaagcttctgttttgtttttattaatctttaccttgttttgtctacttaatcttctgtttctttctttttttttttttttttttctttttagggccacaccaacagcatgtggaaattcccaggtcaggggtcaaatcagagctacaaccaccagcctataccacagccacagcaacgtgggatccacatctgcaacctataccacagctcactgcaaggccaggtccccgacccactgagcgaggccagggattgaacccatatcctcatggatactagtcagattcatttctgctgtgccacaacaggaactcccaatgatttttttccccattttggccgtccaatggcatatggagctctgggccaggggtcagatctgaggtacagtcatgacctgagctgcagctgtggcagtgccggatccttagcccactgtgcggggccggggatcaaacttgagacccagcagtcctgccactgatgcccttgctgcacagtgggaacgcctatgtttctatttctaattcacttccaaaccctctgccggaagcccagctctccattcatatctatttatgttcatagtttttaacttatctttctaagcatggatatctatcaaactatattcatagttcctatcatatatacagtgatctatcagttttatttttctttgattcctcaatcctctccagtataagcgtgctgctccctaggttttcatcccaagaattacgcttcactgctttactatgtcacattcctttttccctggatcccatgtttttgtatcttgattcccctgtctcccaactttggtggagcccattttcctacagcttcttgggaaaagaagcatggtaaataaattcgagagactgcaaatgtctttattttcatacttgattcatagtttaacattttaggttggaaataatttttctccacactctataatcacttcattttacatgaaattctagtgatgctatgttcaataatctgaatagtggtcatttgtatatgactttttctaaactcttctaaagcttttaggatctcactttgtcttctgcgttctgaaatttttatgacgatatacctcgatgtgggactttttatttattgtccaagacacttagtgcgtctgttaaatctgaaattcatatcctttacttgtgagaaattttatttatttgtctgaagattattataatttcatttgaatattatttctgttccttttattgtttgactttttcccatgtgtttgtgtaggtgactttcttcaaaagtctagtgctccttgcctgcctttttgtatttgagagtggaacatgaaaatgctgattggaaactcaactttgtgcctgggcacagattgctgactgctggattctactattaagtgactaagccagggttaagctgttttgttggggaaagcagtttctctagagaggaatcatttagatctttcctagaggatttcagtttttaaaactgttttctatctcattttgtatttcattcttctttcccctctggttcctcattgtattgtacagaccctgtgctgtctttgctgatttctttcttaaccatttaatttttttttctttttcaatgttttacttttagccaagctattgagtataatctcattgttttaatatgcacttatctgattatttatgagcttaactgtctctttctatgctggttatctttttgggtttccacttatgtaagtttgcctattttatttttagtccattttttgtattgggcgtgttctctttttgttgattggctagcatttttcttatgttttagattttatgatttttatttttaattttgtctttttatgaccgcacctgtggcacatggaagttcctgggccaggggtcaaatcagaactccagctgtcggcctgtgccacagccatggcaagactgaatccgagctgcatttgcagtcttcatagcagcttgtggcaatgctggatccttaactcgctgagtgaggtcagggatcaaacccaggtctccagggagactgtgtcggatccttaatctgctgaaccacaatgggagctccttatgcttttttctgattttgacattgtgaacatttccttccacttattatctgtcagttttgtccatgatattcctcactgatcaaaatttataattcgaagccattaaactaatttttttgctttccgatttcctttgcagttttagttaagaagctcttccctacctctgtgtcaaaaaataaccacctaagttatctttagcgttttacctttcacattgagcttttactcatctgaatctgttctttttattttttatttttatttttttaacagtagctgatagtttattaaaaataaactattttaattactcaatatatttattacatttatagttgtacaatgatcatcacgacccaattttatagggtttccatcccacaaccccagcgcatttccccccccgccccccgtcctctgaactgtctcctttggaaaccataagtttttcaaagtctgtgagtcagtatctgttctgcaaagaagttcagtctgtcctttttcagattccacatgtcagtgaaagcatttgatgttggtgtctcattgtatggctgacttcacttagcatgatagtttctaggtccatccatgttgcaaaaaatgccggtatttcgttctttttaatggctgagtaatattccattgtgtatatgtaccacctcttctggatccactcctctgtcaatggacatttaggttgtttccatgttttggctattgtaaatagtgcttcaatgaacatcggagtacatgtgtctttgcaagtcgtggttttctctggatagatgcccaggagtaggattgctggatcaaatggtagttctatgtttagttttctgaggactctccatactgctttccacagttggtgcaccagttggcgcaccaactgacaatcccgccaacagtgtactagggttcctttttctccacaccctctccagcacttattgtttgtagacttttggatgatggccattctggctggtgtaaggtggtacctcgtagtggttttgatttgcatttctctaataatgagtgatgttgaacatcttttcatgtgttttttggccatctgtatgtcttctttggagaaatgtctgtttagatcttctgctcatttttggatggggttgtttgtttttttggtatggagctgcagaaggtgttcataaattttggagatgaatcccttgtcagttgattcacttgcaaagattttctcccattctgtgggttgtcttttcattttgtttagggtttcctttgctgtgcagaaatgtgtaagtttgattaggtcccatttatttgtttttgtttttattgtcaatactctgagaggtggatctgagaagatgttgctgttgtttatgtcagagagtgtttggcctatgttttcctgtaggaattatatagtatctggccttactacatttaggtctttaatccattgggagtttatttttgtgtatggtgttagggagtgttctaatttcattcttttccatgtggctgtccagttttcccagcaccacttattgaagagactgtctttcttccactatatgttcttgcctcctttgtcttagattagctgaccataagtgcttgggtttatttctaggctgtctatcctgttgcattgatctatatttctgtttttgtggcagtatcatactatgttgatcactgtggctttgtagtagagtctgaagtcaggtagcctgattactccagttctgttttttttttttttttcttcccaatattgctttggctgttcaaggtcttttgtgttttcatagaaatctttttttttttttgtctctttgctatttcttgggccgctcccgcggcatatggaggttcccaggctagggctctaagaggagctgtagccaccggcctatgccagggccacagcaacgcgggatccgagctgcgtctgcaacctatactacagctcacggcaacaccggatcgttaacccactgagcaagggcagggaccgaacccacaacctcatggttcctagtcggattcgttaaccactgtgccacgacgggaactcccatagaaatcttaaattatcttgttctagttctgtaaggaatgtcattggtaatttgataggaatttcattgaaactgtagatgccttaggtagcattgtcattttgactgtattgattcttctaatccaagagcatggtatatttttccatctaattgtgtctttgatttttttcaatcagtgtcatagttgtcagagtacaggtcttttgtctctttagggaggtttattcctaggtattttattctttttgatctgatggtaaatggggttgtttccctaatttctctttctgatctttcattgttaatatgtagaaatgaaatcgatttctgtgtattaattttgtatcctgcaactttactaaattcatcgatgagctctaatagttttcttggtagtgtctttaggattttctaggtatagaatcatgtcatctgcaaacagtggtaatttacttcttcttttccaatttggattccttttatttctttctcttctctgattgccatggctaggacttccaagactatgttgaataacattggtgaaagaggacatccttgtcttgttcctgatcttagtgaaaatgctttcagtttttcaccattgagaatgatgttagctgtgggcttgtcataaatggcttttattatgttgaggtaattaccctctatgtccactctctggagagtttttatcaggaataggtgttgaattttgtcaaaagctttttctgcatctattgagatgatcatatagtttttatttttcattttgttgatgtggtatatcacattggtagatttgtggatattgaaaaatccttgcatccctgggataaatcttgcttgaccatggttttcatgtatttggttttaatgtatatttgtatgcagtttgctaatattttgttgaggatttgtgcatctatgttcatgagtgatatttttctgtagttttctttttttgtggattctttgtctggtttggtatcagagtaacggtggcttcataaaatgagcttgggagtgttccttcctttgcagttttctggaaaagtttcagaagaggtgttaactcttctgtgaatgtttggtagaactcagctatgaagccatcaggtcctggacttttgttttttggaagtttttaaatcacatattcagtttcagtacttgtgattgatctattcaatattttctgtttcttcctggttcagtcttggtaggttgtacctttgtaagaatctgtccatttcttctaggttgtccatttattggcatacagttgctcatagtagtctctcatgatcctttgtatttctgcagtgtcagttataattctcacttttcatttctaattttattgatttgaactctcctttttttttgcttgatgagtctggataatggtctatcaatttttttgatctttccaagaaccaatttttggtttcattgatcttctcaattgttttctttgtctctatgttattaatttctgctctgatttttatgatttctttccttttactaattttgggctttctctcttcttccttctctaggtgtttaaggtgtaagattaggttgtttatttgcatttttcttctttcctgagataagattttactgctataaacttccttctcagacctggttttgctgtgtcccatagattatggattgctgtatcatcattgtaatttgtctctgtgtatcttttaatttcctctttaatttcttcattgacgcattgattgtttagtagcatattaaactctttagcatccaagagtttgtgttttttgctgggtttttttttttgtgtgtgtgtgtagtttatttctagtctcatagcgttgtgatccgagaaaatgattgaattaatttcagttttttaaaaatttatcaaggcttatctgtggcctaagataggatctatcctggagaatgttctgtgtgcacttgaaaagaaagtgtattctgctgctttgcagtgagaagttctttagatatcagttaggtctatttggtctaatgtaacttttttttttttcttttttgtcttttctagggctgcacctgcagcatatggaggttcccaagccagcgatctgatcagagctgtagccactggcctatgccagagctcacagcaactctggatccttaacctactgagtgaggccagggatcaaaccggtaacctcatggctcctagttggatttgttaaccactgagccatgatggaaactccaaggtctattgtatctttaaggcctgtgtttcctagctgattttctgtctggatgatctgtccattgctgtaaatggagtgttaaagtcctctctattattgtgttactgtcagtttccccttttatggctgttagtagttgccttatataatgtgctactcctatgttgggtgcatatatatttaaaattgtttcttttttttttccactactgtttttttttaatggatcaattagatatccatgaagatgagtacagagcagtttctgcccctttattattgacctggcccacttataattgagcagaattaacattcagagttcattttgattgaaaacacaaaagctgtactatcttagtgtcattatcactatcaagaagcaagccaaggtcataacaggtttttcctagattgttataagagattaatgtagcttaataacatccaatttactttctagatcaaccaaataatattaaatggtgatagtttttcttcaaaacctgtaagtacaatcagcacatatatgattttgagaaaaatttaatatgttaacttcaccatacaactatattctaaggttattatttttaaatgtaaagaaatggatccttataagaccaaaataacctgaaggccacgaggttggtttttactttttcctttttttttttgtttgaacaaaatatgcaccacgatggttcaacaagtaaggcaagtgccttgaatatgaaagctgtagtttgcaatgtaccacatctagaacccaggggaagtgaatcattctaattaaacatcaggaaacatcatgacaaattggcttgcagcataaaaagtgtccatttaagtgtcttttttcttcatttgatcttagccaaaaggccgagaagcgatgtgtcttttttcttaatgatcagagatcccatgttgttgccactttcttcattgtgttttatgtgcgatccatcacagagtgggaacttgtatgctggaagtcatattcatggctctgtcacttgcgaggatgtgcacaggatgctgagcacagactggcttgtgtggacagtgggagtcaagggactacaagcaacggtcctaagggcagtgataccaggccgctaccatggaggcgcctgttatttcttcttcttatattaattctttgatcattatgtaatgttctttgtctcttgtggccttcttttattttaaaatcttttttttatgattatgagtattgctactcctgcttttctgtaatttccatttgcatgtaatattttattctatcccctcactgtaagtctgtatttatccttagatctgaagtgggtctcctgtagacagcatttgtatgggtcttgcttttgaatccattcagctagtctttttcttttagttggagtatttaatccattttcattcaatgtaattatggataattatgtatttattgtcatatacttaaaattattttttgtttgctatattgggtctattttcttcccttcctctttttgttgtcttgtgatttgctgatcaggtttagtgttaggtttggctggcttttcttatttatatgtgtgaccatcatagttataatgactagtggttccatatatatatattttgtttgtttgtttgtttgctttttagggcctcacctgaggcatatggaggttcccaggctaggggtttaattggagctacagccgccatcctacagaacagccacagcaatgcaggatccaagctgtgtctgcgacctacgccatagctcatggccatgctggatccttaacgcagtgagtaaggctagggatcgaacccgaaacctcattgttcctagttggatttgtttcctctgccccacggcaggaactctctcttatattttgatatatccatctacatgtgtgcagagttggttcgtctttctgatctccttaatttcaagtgcattttcagtgttctgcgtttgtcctctcttcttctcatgcttgctagtttagatatcatatttgtcaatgggtgatttattacttttaaattttctttgcctttaccagtaagattcatcatttttagtattcttgtttctaattgtggcctttccttatctgcttagagaagttcctttaggagttgatgaaaagttggtttggaggtgctgaattctcttaacttttgcttgtctgtgaagctgttgatctctccatcaaatctgaatgagagctttgctgggtagagtgttcctgtttctaggtttctcctcttcatcacctcaaatatatatagccattctcttctgacttgtagagtttctgctgagagattagctcttatcctaatgggaattcctttatatgtgatttgttgcttctcctttgtggctcttattatatatattttttgaacctaaatttgtcagtgtgattagtatgtgtcttgctgtatttcttctggggtttattttgtatggaattctctgtgccttttccacttgagtgagtgtttcctttcccatatttgggaaattttcagttataatctcatcagatatattatttggccctttttctctctcttctacttctggaacccctatgatgtgaatgttggtaggttaaatgttgtcccagatgtctcttagactctcctcagtttatttatttatttatttatttattttctgtagcagtgatttccaccactctttcttccacctcacttattcttctgcctctgttaatcttgctattgattcctactagattattttttatttcagctgttgcattattcattttgttctttaaatcctttagctctttgttaaacatttctcttaagttctcaatctgtgtctccattctttttccaagatcttggatcatctttactgtcattactctgaattctttttcaggtaaattgcctatctcctcatcatttggtgttttttgtgtgtttttgtcttgttcctttgtcttaaagctgcttctttgatgtctcatagtgtatacctttctatttatcttccccttgacagttgatatgtagatgttgaagccagtgtccagtcctggagttctcagggatggtagtggttcacatgtacctctttgctaagtaggctctagggattgttctctgtagatataggagcaggtttcactgttctgctggcactttccttgcttggccactctagggatctctatctaaagcctcaggggtggggggtttctccctaattgttgctcacaggctgtctctgtagctgcaggatgtgtgtttctggtggtccctccccctgccttgctgctggtaggagtgctctctgtagtcctgcagattggaatgtgggttaatgggcctcccctggctcccttggtgtggaaagactgccacctatgtgagcccttcacagggcccctggcaggggtcctgtatctgtggttttttgccagttgggaagcctacagctctgtcagagagtgggcactggcagccctctcatgaaaatgggcactgccccaggcggcttttctggcattgctttgctggtgcaagcttctgcagattctctgggcagagccaagttgcctttgtttttcctgatgaacaggggcaggcactggtagccctctcacgggaaagggcactcccacattggcatgaacctcttcagattctctgggcagagctgagatgcctatgttttccctgctcaagcgggtcactgcttttgcaggaagtgggcgctgccgctagcagtttttctggcactgctttgctgacgtgagcctctctagattgcctgggtggagccaagatgcctgtgtttttcctgatcagcagagagcaggcctggcggccctctcatgagaatgggcgcagcctctctgggtggagttgagattcctgtgtcttccctgctcaagcaggtcatcgcttttgtaggaagtgggcactgccacccccagcttttctggtgttgcccagctgttcagatccctggcagattctctaggtggagtcacagtatctgtgttttccctgatcctttcgagggatgagcactgccagccctggcagctcttctggcacaggttgggctccactagcgtagggcccctgccggccagaaccaggaacttatgttattcccccaggcagttactccacctgctccaaaaagtctgtagctctcagggtgggactgattcccagccattgctaggcagccactacagccaagtgattcccaagttgaggcaggcagtgtcctgcagcttgagaaagcaggcgtaaggagcaaggctgtagtggtggatcctgtctcttccttctagcactcccaaacaatggcatcttgtctctaagcccaactgggttgcctccacttagatgctctccattgtggtcgccctatactctagtccctccaggctattttcgcaagggcagtcctggttttttccccacgtagagggccccagctccttctttgggtctgatccctaagaccatagttttagttcccaacaccatctggtacctgcctatggttgcttgttgcccttagcattgactatttatgaggactgtctccttcttaactgcttcagaccacttatctagagttcctcctgtttttggctggtctcatcactgatgtgggaacttcctggggtgcaggagctattcctctttctagctcccacctgggggagcaggttctgtctcgtttccttttgctttttttttttccccacttcttctttcttatgtcctatcaggttttgtaatgtttttcttgttctatcataatcttgaggtctattgtcagtttttcgcaaattttctatgcaaatggttccacctgtagttgtgttttcaatgtttttgtgggagtagatgagccttacgtcctgctaatctgccatctttgtaataagttttcaaaattttttaaaaatcacggtaaaataaacataaaatttactggcttggctattgtgaatagatgcagactattgactttgaaatggattatcaatgagatcctgctgtgcagcactgggaactatgtctggtcacttataatggagcatgataatgtgagaaaaaagaacacatacatatatgtgtaactgggtcaccaggctgtacagtagaaaattgacagaacactgtaaaccagttatagtggaaaaaaatgaaaatcattatataaaaaaataaataaaatgtattggcttaatcattttttaaaataaaatgattaagactaatttttagagcaattttaagttcacagcaacaaaattaaagggaagttatagagatttctgataaactccctgtccccacacatgctcagccttccaaactgccaacatccccaccagagttgtgcatttgttgtaattgatgaacctacatagacacatcattactcaaagtccatagtttacattagggctcacttgtggtattgtgtgttctataggtttgcacaaatgtgtaatgagatgtatctatcatatagtgccatacagaatattttcaccaccttaaaaataatccatgttctgccagttcatccctaccctctccttcaccttcttgcaaccactgatctctttactgtcaccatagtttttctgtttccagaatgtcatatagttggaatcatagagttttgtagcctttccattgtggcttcttttacttagtgatatgagtttaaagttctttcatgtcttttcatgacttgatagctcattttttttggcaattagtaatatgccattgtctgaatccacagtttctttcagtacatttactgtggacatcttggttgctccaagtattgatacttatgaataaaactgctctaaatatccatattcagatttttgtgtgggtttaagttttcaattcctttggataaataccaaggagcatagttgctcagtggtatggttaagaggatgcttaatttttaaagaaactaccaggctgtcttccaaattgtgtctatactcctttgcattcctgccatcaataaatgagagttgtcgttgctctatatccttgccagcatttggtagtgtcagtgttacggattttggctattcaaataaatatatatatttatacattgatacacacaaatatatacatatgcatgtatctcattgttttagtttgcatttctctgatgtcctaatcatgtggagcatctttccatattcttttttgtcctctttggtgatgtgtctgttaagggctttggcctattttttatttggattttcttattaagttttaagagtttttgtttattttggataacagtcttttatcagtgtgtcttttacaaatatttttctcccagtgtgtggcattcacttgacacattcacttgtcttctcattcacttgacactgtctttcacagagttttttttttttttttgtctgttgtccttttttttagggacacactcatggcatatggaggttcccaggctaggggtctgattggagttgttgctgctggcctacgccagagccaaagcaatgcagggttctagccgaggctgcgacctacaccacagctcacggcaacaccggatccttaaccaactgagtgaggccagggatcaaatccacaacctcatggttcgtagttggattcatttctgctgagccatgataggaagtccagaagtttctaattttagtgaattctagcttttaaattctttctttttttttaaaatatggaatgcttcacgaatttgcgtgtcatccttgcgcaggggccatgctaatcttctctgtattgttccaattttagtatgtgtgttgccgaagcgagcacttaaattatttctttcatggattacacctttggtgtattatctaaaaagtcatttccattttcaaggttgtctagattttctcctatgttatcttcttggagttcagtatttttgcatttacatttatgtctgtgatccattttgaattaatttttgtgagggatataagatctgctcttgattcatttttttgtttgtttgtttttaatcatgtggatgttctcttccagcactatttgttgaaaaggctttctttgctccattgtattatctttgttatcctgtcaaagatcagttgaatgtattttcatgggtctttttctaggttccctgttctgttccattgatctgtttgtcttcttttgctaataccacaatgtctccccccccaccccaccccccggtcttttttaaggctgaactcatgacacatggaagttcccaggctaggggtcagattagagatatagctactggcctacactgcagccacagcaacaccagatctgagccatgtctgtaatctgcaccacagttcacagcaacgccagatccttaacccactgagggaggccagggtttgcacccatgtcctcatggatcctagtcagattcattaccactgagccacaatgggaactccaaaactgtcttaattactatagctttatagtaagtcttgaagttgggtagtgtcagtcttccaactttgtcctcctattgtggtgggtattctgggtcttttgtctttccatacacttaaaatcagtttgttgatatccacaaaatattgattgattgattgattgccatacccgcagcatatgaagtttctgggtcggggattgaagctgcacctctgcagtgacctgagccaccacagttggattcttaacccactgagcctcagcaggaactccacaaaatatttcagttactagaattttgactgggatcatactgaatttctaggtcaagttgggaagaactgacatcttgacaagattgagtgttctccaagaatatggaattatctctattgtatatagttctttgatttcattaaccagagtttaagagttttcctcatatagatctacatattttgttagctttacacccaacagtttcatttttggggtgttaatgtagttggtaatctatttttagtttcaaattctatttgtttattactggtgtataggaatgcaattaacttttgtatcttaaccttgtatcctccaatcttgctaaaattacatgttaattccagggtttttttttttttttttaatcagttcttctggattttctatgtagatgatcacggcatttgtgaaaaagacagttttatgtcttatgtcttcattcccaatatgtatacttttaagctaaaactttgaggatgagattgaaaaggagtgataagagggcacatcattgcattcggaaaattgtttatttttttgcctgtgtccttgactggaatgttcttatccttgtaatgtccccttatccttccttttaactctttgccaaaagcaagactacttctgtcatgatgccaaaactggtactttgcccatgtggagtcctttgaatgttggagcagttagaacaattagattttcttcttcttcttcttcttcttcttttttttttttgctttttagggctacatgtgcagcatatggaaattctcaggctaggggtctaattggagctgtagccaccagcctacagcacagccacagccatgcaggatccaacttgcacctgtgacctatgccacaatgccacatccttaacttgctcagtgaggccgggaatcgaacttgcatcctcatagatactagttgggttcattgagccatgatgggaattcctttttcttcttctttttgctgttagttttttgagtagatcttcataagttggttttgagctttccataatctgagagcatttgatctttacctagttactactgcctggaactcatcaggctttaggttacttgatgaaatgtttagcctcatcaagagagaaggaaactgttatgaattatgattccagaagagtatatgtgacttaagtattttttagcattttttttatttttggaaggttttttacccatgttaaatatgtggcaactagtgaggataggaattcaaaaaaatttttatcctgtgactttattgttgaacctttcttgaagacatttttatgaaaaatactgtatttaaaatgtcacatatgtaaattatgaagcttaatagatgttttgaatcaccatcccctttatgaaaattactggtactgtttacatattcttttcctgttgtgttgttcattccccatcctgtgttgtttctttcccttcctttaaaaaaaatttttttgttatggttgctatacagtgtcctgtcaatttctgctatacagcaaaataacccaattatacatatatatacattctttttctcacattatcctccatcatattgcatcataagtgattgggtatagttttctttgctatacagcagaattttcacttcctttaaaaaaaaagctttatcatgtatatatgtcccccaaatactgtatttaaatttgcttcttgaagttttacaaaaatggtaccttaccatatatagtctttgttctgcaatttaatttttcactcagtattgcttctaaggtttatctatgttgccaattgtggttcattaataattatactctgctgtgtaagtataccatatatatgttatatatgtgatatatatataatatagaacactatataatacagaacatagtatgtataataactgttgtatgactgtgccacatattttaattcttttcttgatgcacatttgagttgtttccttttttgctattatgaacaaagctgccatgaatatctggtttttttcttgtttgctatgtttatattttaagtcatgaatggtgtagaattgtattacatactttaatctatttagatagtttttttattttattaatgttgttaattacctttttaggcattctgatgttaaaatcttgaatacaggaataatcccaacttggtcgtagtgttttatatgttcaatttacttttgggcttgatttactaatacatgtttttgagattttgtatctacttatgagtaagataggtttataattttctcctgtccttttaccaaaattatgatggccttgtagaatgagttggggaataatttctcttcctattttctgatagaattgtatggccttggaataatttgttcttggagagtttgatagagcttaacctgtgaaactatgtttaagagtgatgcagagatttaagtactagttcattttctataggacagtttggtttttattgtttctcgagttagttttgctgagttaattttcttgggaattttctgtttaagttttaaatttattgatataaattgttcatgataatttttatattgtggtaaaaagcaaataataagctagtctcttaaacttttaagtgtgtagtacagtatacacagtgttgtacaacagaactccaggaacttttttatcttgtatgactaaaactttatacccactgaacagcagctctcactgtttttgaggttatttccttttccttaaaaaaaaatccttatactatttgttgtcttttctttctctcccttcctctactcccgtcagattgctagtgatttgtcactctgacaagtctttattgctttcttgaaaaaaaaaaaaatatatatatatatatatattttccccttttttttcctactgtacagcatggtgacccagttacacatacacgtttacatacttttttctcccattatcatgttccatcataagtgactagacatagttcccagtgctacaacagcaggatctcattgctaatcctttctgaaggcaataatctgcatctgttaaccccaagctcctaatccatcccactccctccccctctcccttggcaaccacaaatctattctccaagtccatgattttcttttctgtggaaaggttcctttgtgccatatattagattccagatataagtgatatggcatttgtctttctctttctgacttacttcactcaatatgagagtctctagttccatccatgttgctgaaaatggcattattttgttcttttttatggctgagcagtcttccattgtgtgtatatatacaccacatcttcctaatcccatcatctgtcagtggacatttgggttgcttccatgccttggctgttgtgaatagtgctgcagtgatcatgtggatgcatgtgtttttttcaaggaaagttttgtctggatatatgtccaagagtgggattgctgggtcatgttgtagttttatgtatggttttctaaggtacctctgtactgttctccatagtggctgtaccagcttacatttccaccaacagtgcaggagggttcccttttctccataccacctccagcatttatttgtggacttattaatgatgaccattctagctggtgtgaggtggtatctcatggtagttttgacttgcatttccctaacaatcagtgatgttgagcattgtttcaggtgcttgttggccatctgggtatcttccttggagaaatgtctattcaggtcttttgcccatttttcagttgggttgttggcttttttgctgttgagttgtataagttgcatcatttgaaactattttctcccattctgtaagttgtctttttggcttctttttggtttcctctgctgtgcaaaagcttgtcagtttgatgaagtcccattgtatttttgcttttatttctgttgttttgggagactgacctgagaaaacatttgtaaggttgatgtcagaggatgttttgcctatgttctcttccaggggtttgatggtgtcttgtcttatatttaagtcttccagccattttgagtttatttttgtgcatggtgtgagggtgtgttctagtttcattgctttgcatgcagctgtccaggtttcccagcaataatcactgaaaagactttttcccattttatgttcttgcctcctttttcaagattaattgaccataggtgtctgtttttttttatttttatttttgttttgtttttgttttgctttttagggccacacccacggcacatggaggttcccaggctatgggtccagtcggagctacagctgctggcctatgccacagccacagcaacatcagatctgagccatatctgcaacctacaccacagctcatggtaatgccggatcctgaacccattgagccaggcaagggatggaacctgcaacctcgtg

SEQ ID NO: 34 - protein, 747 aa, Sus scrofa
MKNGLELEATMGDEDWEAEIIKPHMSSYVPVFEKDRYSSGANGDTYNRTPASSSEMDDGSSRRDHFMRSGFASGRSLGNRDPGESNKRENTSTMGGFGVGKSFGNRGFSNNKFEEGDSSGFWRESNNDCEDNQTRNRGFSKRGVTNLTKLNGFQDGNDSEASVSSRRGGRGSFRGCRGRFGLGSPNSEYEQDEGTHRTGGFFGSRRSALSGAGNGDTYQSRSGSGSGRGGYKGLNEEVITGSGKNSWKSEAEGGESGDIQGPKVTYIPPPPPEDEDSIFAHYQTGINFDKYDTILVEVSGHEAPPAILTFEEANLCQTLNSNIAKAGYTKLTPVQKYSIPIILGGRDLMACAQTGSGKTAAFLLPILAHMMRDGITASRFKELQEPECIIVAPTRELINQIYLEARKFSFGTCVRAVVIYGGTQLGHSIRQIVQGCNILCATPGRLMDIIGKEKIGLRQVKYLVLDEADRMLDMGFGPEMKKLISCPGMPSKEQRQTLMFSATFPEEIQRLAGEFLKSNYLFVAVGQVGGACRDVQQTILQVGQYSKREKLVEILRNIGDERTMVFVETKKKADFIATFLCQEKISTTSIHGDREQREREQALGDFRCGKCPVLVATSVAARGLDIENVQHVINFDLPSTIDEYVHRIGRTGRCGNTGRAISFFDPESDSHLAQPLVKVLSDAQQDVPAWLEEIAFSTYVPGFSGSSRGNVFASVDTRKNYQGKSSLNTAGFSSSQAPNPVDDESWD

SEQ ID NO: 35 - DNA, 32286 bp, Bos taurus
tgacgctgattggctgatggagttcgtcgcctggtgccatttgttgttggataagcgcaccagacgcagtctgcgtcctgcacgtgcagccgtttaagccgcgtcagcgcctgtgaggaccccgggagagcaagccgcggagaggtgagtaggccgccggctcttttcccagtacaggagtcatcccaacgctctggccttcctagtagtagctggacttcgggccaagtgaagaaccgttggggtgggtaggggtttgaagctgtcctttggggtctttctgcttcctgccggagagtccagtagcacggtgcgtgtccgaagtctggagttgaggcctgcaggaaaggcgaaggagcatttttgaccacctggtgctacaccatccgtgttcagagaacaagactctcagaacacggatggttgtagaactattcgtgtatacactttctttcgcgaaagtagttgtttgttggagacatttgggccacctaatcaccccttccttccctgccaaacttcaaggccttgatccctggtcaatctccccctccccgccaaagaaactaaataaaccccacgcgaaatgtcgtacccagttttgaagggagaaaccttgagtagtgtctgaaaaatttcccctcccccttaatattcagtaagacgtactgggaacccttcggtgagaaaataaattctgtcaacagattttggggaaaagcctagacttcaccggaacatggtgattgctagagtgattagataagtggttcaactaattttttaaggtaaaaaattggaagcgctcagtagtgtccgactctttgcgaccccatggactatacagtccgtggaattctccaggccagaatactggagtgggtagccattcccttctctaggggatcctcccaacccagggatcgaatccaggtctcccacattgcaggcggattctttaccgtctgagccaaaaggatgaatataaatggtctctctcggtaagaaacaaaactttaattgctctttttgcaaaaacttctggggaggatcaacagttaattgtgtagtttggaggtatatgtgtgaaaagatggtttatgcttttaaaggtacaactgtgatctctgattctgactgagcctaaatgtgcatgtttgtatttttataaaaactgaactggaagccaccatgggagatgaagattgggaagcagaaataatcaaacctcatatatcttcctatgttcctgtatttgagaaggtaataaaatttaaagtttgtagttattgaatgctacagattttatcaaagttgaaaatctctgtggtgagaaagttcatctgtggtgagaagcatgctgtgcttctccacctgatggttattaactgtcttatagggaatgatgaagcatgctaagcctcaaatagaagaaaacagtctgacgtaatgtaataattaaaacctaaaacgggtataatattattagcaacttaatttaaatctcagtgatttagaacttattgtgggtgaaagcaagcttgtgttaatgtggttgaatgtctcagatatagttgtatagaaaatggaaaaataaaattcgtttttgggtggcaatttgaattctgaaaattggttttatacaagcaggggtctcaagttgaaaacattaggctggttcagatggtaacatcagtttgatcttcagatgtacaaatctgcagatctttttcctcaatagcttttgaaaagttacactgtaatttaggtgagggggttatggagtgggtttttggaatttagttgtgactttaagatgatgaacagagtctactttggaaaacagtatatttaatggattgcttttacataaattttatctacttgaaaatgtctccaaaggtcaaattgttttccttttaggatttccagtttgtatttatgttagtcagttctgacactttctatttcaagtgatatcttatagaaattcttaatttaccccaaaacataaaatttaattctttgtctgtcttgaatttggtctgtttgcatataaagtttagattaaaatacctaaaatgttaatctgaatttataatgtttcttgctttgggacttgttttagaaataacattttttttgtatgttatctttttatagtcttctttatgttacaatatcataaaaatactgtaagaccaaaagaggtgaaacattacctaacagtctcgctcactagcacaaatgctctgttgaggttttagtaaattttctactgtatttcccaaacacatttttatatggattgtaatgattgtacattatagtaatttttgatttcagctttttcactcttcagcactagctatcccgtattactaacttcctaaaaataatttcttatggttatatagtatttaatggactagaactaccataacataattaattttctgttggtagaaattaaagtgttatctttgcactgtagtattgtcatgaatatctacagtttattattggggagtatttttttcaaaaattgaattacttggtcaaataattttttatggttctttttttcccaggttcttggtagatttgttctaataacacagtttaactcacaagtacagatgttcttccatttgtaccaaagtaccgtttggacttgtctaatttttactttttcttactctgagattttgtcttaactaagtattattcaaatggtatactgcactgtagcatgttgtgcatggttattgcaaagggtgtctgaaattgaggatggtcaactgtcaggcttccagatttaccttttgggagtctttgtgctattcagtaacatactttgtttcttgatattggtcatactgattgaatattaattatgttaatatttctaccttacgattcctagtacatatctgtgtggggccaatttgtagtaaattttttacatttgtccacaaacttaacatctgatgctagatgtgcagttagtaatttgacctacttgacttgaaggaacatgatggctttgtttgcttgtcttcgttgaataagctgtgtagaagctaatgaacatatgacatttttatgtaggagaaatctgaggtcttttcttcagcctgttttcttttaaaggcaccatttgattggttggtctaattgggtttctgtttcaagaagtgactgggtttcccttttgttcaatttgtattggctgtgacatcatcttggattggtaataatatctgtgatcagccttttcttaatttaaaaaattgggagtatatttgatttacaatgttgtgtttctgctgtacagcaaaataggtcagttatacatacacatatattcattttttattttgtattcttaatataggtctttaaaaagtattgaatagaattccctgtgctatgcaggaggttcttattatgtgataagccttttctgagtgcttctaaggatccttctaaggagatttagtattaacacaaacttacataattttgaactaacaggttgctcttctggtagattttagaacttcccaatgctagtttttgaagtgaatgtaccatgcggggatagaataataaaaaaatgtgaggttgagaaatatttggtaatctagcagttacagtagtccagaaatggttaggcatttgcacattgtgtgcacacttgttgggatgagagatgaaatggatgagcgtgatgagtgtaaaagtatactgggtttgcttgctagttgtaatatttcttactaaatgactgatgagtctacacactcatctcttctgtctgatctttttgccatttttctggtgtatttcagaaggcatatactcttgtaattaaagtggaaactgctcaagataattagtccatccacaattattattttgaaatttataatgtttgaaataatgttaagttttaaaatttataaattggttcacttggatgagtaaagaggttataaaagttttatagctaagtgttctaaaaataggtaacgttaagacctaagactcattcaacaagtttttttgagccttattagatgctggagctagtggtgaacatgatagataaggggcttgctggcatggatgttgtattttactggaggagacagaataagcacattaaaaatcacatactaatagtaaaaagtattaaataataatttaataataatagtaataagagaatcaggaaactctctgtgtgagggagagaggaagagtattggtatgggtagatttagatcatgtggaggggaaaatattccttgagactatgactcatgagctggagacctgaaagagtcccagtaacacatgatgtgcaaagatcctgaagaggaaacaaacttggggtatcaggacaacaggaagaagtacaatgtattagttgtctatagatgctgtaaccaattatcacaaactagatagcttacagtaacagaaaaatttctcttatagttctggaggccagaagttagaaaccatggtctcagcagtgctattttccttcagtaggctcttggagagaatccatgcttcttccaacttctggtggttataggcagccttggcttgtggctgcatctctttctgttgtcttcacttggccttctctgtgtttgtgttaatacccttggcctttcataaggacacttgtgatgacatttaggacccacttggataatccagggtaatctcttcatttcaaaattcttagttatattggctagaactttttttttccaaataatataacacatatttcagaaattagggcttgatatcattgagtgtgatatcattgagtggacattattcaatctcctatagctagtatagagctatttgaaatcctaaaagatgatgctgtgaaagtgctgcactcaatatgccagcaaatttggaaaactcagcagtggccataggactggaaaaggtcagttttcattccattcccaaagaaaggcaatgacaaaaaactaccacagagttgcactcatctcatgctctagcagagtaatgctcagaattttcaaagctaggcttcaacataaactgagaacttccagatgttcaagctggatttagaaaaggcagaggaaccagagatcaaattgccaacatccgctggatcatagcaaaagcaagagaattccaaaaaaacacctacttctgcctcactgactatgctaaagcttttgactgtgtggatcacttcaaactgtgtaaaattcttaaagagatggaaataccagaccacctgacctgcctcctgagaaacctgtatgcaaggccagaagcaacagttagaactggacatgaaacaatggtttggttccaaattgggaaaggagtacgtcaacgctgtatattgtcaccctgcttatttaacttatatgcagagtacatcatgtgaaatgccaggctgaatgtagcacaagctggaatcgagattcccaggagaaatatcaataacctcagatatgcagatgatatcagccttatggtcgaaagctaagaggaactaaagagcctcttgatgaaaatgaatgaggagagtgaaaaggctggcttaaaatttaacattcaaaaaacgaagatcatggtatctggtctcatcactttgtggcaaatagatggggaaacaatggaaacagtgagagaccatttttttggggttctagaatcactgcagatggtgactgcagccatgaaattaaaagatgcttgttccttggaagaaaagctatgaccatcctagacagtatattaaaaagtagagacattactttgtcaacaaagatccatctagacaaagctgtggttttttgaatagtcatgtatgggtgtgaagttggaccgtaaagaaggccaagtgccaaggattgatccttttgaactgtgatgttggagaagactcttgagagtcccttggactgctaggagatcaaacctgtcaatcctaaaggaaatcagtcctgaatattttggctacctgatttgaagagcagactcattagaaaataccctgatgctgggaaagactgatggcaggaggagacggggatgacagaggatgagatggttggatggcatcatgtgactcaatggacatgactttgaacaacctctggaagatggtaaaggagagggatgcctgttgtgctgcagtccatgggatcgcaaagagtcgggcatgactgagtgagcaacaacaaatatcgagtatggctaaactatagtaagatggaagatttatagtaaatgaaatctgagagggaaagagaaaaggaagagagggagaggaccctggagatagaggtggacatatagttgatagaactagatgggctggatatggggaatgcaagagagagtgatgctaagtttttttactgaagcaagtagatagatgatggtgctctttattgaaatggagatgatccagtttggcagggaaaaaaatcaagaattctgtatttgcagtgttcaatttcagaggcctaagaaaagggtaccctactccagtactctggcctggaatatcccatggatggaggagcctggtgggctgcagtccatggggtcgctaagagtcagacacgactgagcgacttcactttcactttccactttcatgcattggaggaggaaatggcaacccactccagtattcttggctggagaatcccagggatgggggagcctgctgggctaccgtctaaggggtcgcacagagtcggacacgactcaagcgacttagcagcagcagcagcaagaaaagatttaagtaaggatactagtcagtagttgttgtttaggagagggatcagagctgtaggtacaaatttgggatttatctattttaataggatttaaatctgtgaaagtgggtaaagttggatggaataaaacagagagctctgccatgaactgtgggacactttgactttaaaggtacgttagctggggagctggcaaaggagactgtggagggaatggctatggggcaagaggaaaatctgggaagtatgtgttccctaagccagagagggaagtagatagtctgttgtttcaaatgctgctgagagctctggcaggatgaagcttaaaagtagtaattttattacataatatgcttactataagctttttgagtgcagaggtgaggatggaggctagcaagagtagcttgaaggaaatatggaatgtgagaaaatagaggcagcaaatgtagacaaaattttttgcctacaatggagcagataaatgcttatttcttatttatttcttataaaaattaccttatttttaaggtaatgaaaaatgttaaggatttttatgatgaaagatgaattctattgaaacaaaattttttttttttccaaaattttccttagaatgtatgtgggatgttaaattccatcttctgaagattgtttggtaataataatttttcagttgtttggtaccagggtgtttcattactttttatcagttatatgaagctgaatgttataacacttataaaactagcccctttgggggctctattcatccagtagtattttggatactagaaaagagaaagtcttcagtgtttcactttaaatcgggaaagctagattacttttcttgtttgtcttattgtctatggtaatcataaattggaactttttactgtagcagttatcaaaatcccaagccatttcaaggattttattgtatgtttttagtaagttagaaaaatagttgaatgtcttttgagctttataaaggtagtttttaaagtcagtgtcttttgtgaaagaaatttgggagcaaaagtattacctgaagatgttaatacctaccttggtgcactccctccagctttaggtttatttaaagaaacttatttgacaaaaaaatcgtaatttttctaattcagtcagttaattgaagtgttatctgtaaactttaggtcactttttgtgcttaaattattgaatttgattttgaagaatttcagagctctgttcaaaagttttgcatttagtatcagaaacttgtttgagaggaagcagactgttacatacctagatgaattgaggatggcttttttccaataaaactttatttataaaaactggtggcccaccagatttggcttgtggctatagtttgctgaccattgttttaagtgatatattagtatgctatacatacaattttaaagtgaaggtgttttagagtagttaataaaggaacatgcagtgacccaggaaatcttacattctttaattgttttgttctggacaaaacccagttgttaaaactttctagtatttatgagatagattactcatttttattattcaaagtagaaaactaatcttttcttttttcttacaggataggtattcttctggagcaaatggagacacttttaacaggactccggcttcatcgtcaggtatgtgttaaggcaaaaatgcagaactgtttttaggttaagggcttcatgcattggatgagaagcagactagtagataccttgtcaaggatgtctttaaaattttctagtgagacattccggagaaggcaatggcaacccactgcagtactcttgcctggaaaatcccatgggcagaggagcctggtaggctgccgtctatgcggtcactaagagtcggacatgactgagcgacttcactttcacttttcacttcatgcattggagaaggaaatggcaacccattccagtgttcttgcctggagaatcccagggatgggggagcctgctgggctgccgtctatggggtcgcagagtcggacacgactgaagcgacttagcagcagcagcagtgagacattctggcttgaatattttgggttgggagcctcttagaattaaaggaagggagagaagaaagagtgtagtattacagagtgtatcctttgatttagtgggtttgctgtaaaacctttgcccagcctggaagttgcatgtttggctttcaggctgctatgggaattgtcaggattcctgatatgaggcagtaggagagtagactcaggtgttgaagcaggttacagtgatggtgacttgtcaggataacaactatttaaaccaaactcatatcaaattaatatgcataaatcccttgcatttctatacactaacaatgagaaaatagatacagaaattaaggaaacaaccccattcaccattatgtcaaaaagaataaaatacttaggaataaatttacctcaggaaacaaaagacctatatttagaaaactgtaaaacactgatgacagaaatcaaagatgacagaaatagatggagacatataccatgttcatggattggaagaatcaacatagtgaaaatgagtgtactacccaaagctatctgtagatccaatacaatccctatcaagccaccaatagcttttttcacaaaactagaacaattaatttcacaatttgtatggaaacacaaaaaacctcaaatagccaaagcaatcttgagaaagaagaatggaactggaggaatcaacctgcctgacttcagactatactataaagctacagttgtcaagacagtatggtactggcacaaaaacagaaatacagatcaatggaacaaaatagaaagcccagagataaatccgtgcacctgtagacaccttatctttgacaaaggagacaaaaatatacaatggagaaaagacagtctctttaacaggtggtgctgggaaaactggtcaaccacctataaaagaatgaaactagaacacctaacaccataaacaaaaataaactcaaaataaattaaagatctaaatataaaaccagaaactaaaactcctagaggaaaacataggcagaacactctctgacataaatcacaacatgatccctctgtgacccacctcccagagtaatggaaataaaagcaaaaataaacaaatgggacctaattaaacttaaaagcttttgtacaacgaaggaaactataagcaagttgaaaagacagccttcagaatgggagaaaataatagcaaacaaagcaactgataatctcaaaaatatacaagcagctcaataccagaaaaataaatgacccaatcaaaaaatgggccaaagaactaaacagacatttctccaaagaagacatacaaatggctaacaaagacatgaaaagatgctcagcatcacttatcagagaaatgcaaatcaaaaccacaatgaggtaccatctcacgctggtcagaatggctgctatcaaaaagtctacgaacagtaaatgctggagaaggtgcggagaaaagggaaccctcttacactgttggtaggaatgcaaactagtacagcaactatggagaacagtatggagattccttaaaaaactggaaatagaactgccatatgacccagcagtcccactgctgggcatacacactgaggaaaccagaattgaaagagacacgtgtaccccaatgttcattgcaacactgtttacagtagctaggacatggaggcaacctagatgtccatccgcagatgaatggataagaaagttgtgatatgtatgcacaatggaatattactcagctataaaaataacatacttgagtcagttctaatgaggtggatgaaactggagcctatacagagtgaagtaagtcagaaggaaaaacaccaatacagtatattaatgcatatatatggtggaatttagaaagatggtaacagtgaccctatatgtaagacagcaaaagagacagatataaagtacaggcttttggactctgtgggagaaggcgagggtaggatgattttagagaatagcattgaaacgtgtatattaccatatgtgaaatagatgaccagtccaagttcaatgcatgaaacagggcactcaaagctggtgcactgggacaacccagagggatgggatggggaggtaggtgggaggagggtttggaacagggggacacttgtacactcgtggctgactgatgtcagtgtatggcagaacccaccacaatattgtacttaaattgatgcttttgaactgtggtgttggagaagactcttgagagtaccttggactgcaaggagatccagccagtccattctgaaggagatcagccctgggatttctttggaaggaatgatgctaaagctgaaactccagtactttggccacctcatgcgaagagttgactcattggaaaagactctgatgctaggagggattgggggcaggaggagacagaggatgagatggttggatggcatcatcgactcggtggacgtgagtttgaatgaactccgggagttggtaatggacagggaggcctggctggctgcagttcatggggttgcaaagagtcggacacgactgagcgactgatctgatctgatccaattaaataaattaattaaaaagtaaaatatttaattaaaagataatatgagcctctttgggatctgaaaactaacttagggaggtccttggcaaataagagaaacaaatcaagataagggagctgttgtttttcccgtcacttgtctccattttgttcacctacatttttttataaagttgagaagatagctgtaagtggtaggacctgggctagaaaattaaactcatgacagtagtctttgattttgttgaagttcacagcaggctgatatgctacttctagtattttttcagttaagaaatacatgtagcaacgaaatttactgtattaaccatttttaaatgtactgttcaagtgatattatgtaccttcatgttgctgtgcagccatgaccaccatctacctctgaaactttttcaccttcccaaactgaaatttcatacccagtaaacaataactcaacaatcactcctctcctcagctcttggcaaccattgtttactttctatgaatttaagttactatgaattttctgagtctctgtgaccttgagtaactacttcttttaagtcttactctcatgcaagaaaggggctttcttggtggctcagtgatacagaatccacctgccaatgcaggagatgtgtgtttgattccaagtcaggaaaatcctctggagaaggaaatggcaacccactccagtattcttgcttggggaatcccatggacagaggagcctggtgggatatacagcccacggagttgcaaaagagtcggacgtgactttgggactaaaacaacaactaatgtaagaaagagggcctggtgacaccaggtagtttcatttctctcatcaaaaatttgtgaatgaagtaaaacatttttatagttaagggagctactgactcactgaagcctgtcctaatgtgaaaaaacctgtggagaggtagtttataaaatgtaaaaggtggtgggttgttgagagatttcgtcaggttaaagcaaatttaattcccatgttcaccttaagttcagagtaatcctcttgatagaaggaagtcaagtttagatgaaatatttttgttgttgtcaagatacacttatcttttgtaaacttttaaatgcagcagtttaatgtagaatatcctgattctcaaaagtttatgaaattgctgcctgctgaaaccccaggaaaaggctaataaccatgtgtaggtacttgaagtattcaaagaagaaaattgggtgaaagtattctatacttaacatatctatatgcatagatcattgtgtaatcaaaagaaaccttgttctgtgaggtgtcaaagataactttcataaaggaatgaaagtttgaatctatagtacattaaggtgtaacgttgtagtgaagtcatcaataagctagattgaaatggccaccagctaaaaatgtggacttttcttagcattagatcttgaatgttcagactaatgaagtaaaatcaataatgaaaaatatagcttgcttatttaccttctgaataataagtactttggtatctctatttttttttttagtatatttcttttatttattttttaaatttaaatttatttattttaattagaggctaattactttacaatattgtattggttttgccatacatcaacatgaatccgccacgggtgtacacatgttcccaatcctgaacccccctccctcctccctccccataccatccatctgggtcatcccagtgcaccagccccaagcatcctgtatcctgcatcgaacctggactggcaattcgtttcttatatgatattatacatgtttcaatgccattctcccaaatcatcccccctccctcttttttaattgatttctttttcatgaaaatagattttcttattacagaaatacataccagggcaatgaatgctatcctaagttactatctaaatattcttattgcaaaaaaacaaaaaaaaagaaaaaacttaaatatagtggtgaaaagaaagaaaataatctgaaatcttgacttccaggtttaaccacttttgttaaactctgttttgttaaagtctgttgactctgatattttagatttctttctttttaaaaaaaaaaaaatttacttatttgagtctgctctgttgcagcgtgcgagcttctctctagttgagacgtgtaggctcagtagcttttttgccctgtgtcacgtgggatcttaattccccaaccaaggatcgaacctgtcacctccattggaaggcagattctttttattattattatttattttaattggaatctaattactttacagtattgtggtttttgccacacaaaataccagaccaccaggttcatctgtattgccaattattgtagttcatttataattatactctgttgtgtggatataccatatatttaatactctgtaatacagtatagaacacaatatatgtaaaactctgttgtgtgactgtaccacatatttgaattctttttttaatgtacatttgagttgcttccttttttgttgttatgagcaaagctaccatgaacatctcttattttcccttgtttgctaaatatatggtttaggttatgaatggtgttgaattgtattatgtactttaatctgtggagatatactttttaatctgttaatgttaattaattacctttttagatgttctgatgataaacacccttgcatactggagtaaactcaacttggtcatactgttgtacctgttcagtttactattgggattgatttgctaatatgtatttttgagattttatatctgcctgctgctgccaagttgcttcagtcgtgtccgactctgtgtgaccccatggactgcagcctaccaggcttctctgtccatgggattctccaggcaagaacactggagtgggttgccatttccttctccattttatatctactcatgagtaaaagaggtttaattttcttctgtcttgtcatatcataattactatggccttgtggaatgaattggggaataattcctctttctattttctgggagaattgtataatgttggaatgatttgttctttgagagttcgctagagctcacctgtgaaactacatttaaataggtttgatacagagatttgagtactggttcactttctgtaggacagtttttgtttttgttttcttgagtcagttttggtgaatcagaactttgctgtttgtcttttttagatttcagatgtaagtgatatatttgtcttcatttttctgacttgcttcacttagtatgttattctctgggtctgcctatgttgcttcaaatggcattatttgtctttttttaatgactgagcagtattccattgtgtgtgtgtgtacatattctttgtcctttcctctgttgctgggcatttagatttcttccatatcttggttattgtaaatagtgcttctgttaacattggggtacataggggtgtatgtatcttttcaaattagagttttctccaggtatatgcccaggagtgagattgccagatcatatagtaacttagttttttaaagaacctctgtaacgtatggaggttttccatagtggctgcaccagtttacattcccaccaacagtgtaggagggttcctttttctccacactctcttcaggatttataattttatgacaaacccacagccaacatagtggtttattttcaggaccttttagtgatagccattctgactgatatgaggttatgcctcattgtagttttgatttgcatttctctgatagttagcagtgttgagcatcttttcatgtgcctgttggctatctgcatgtcttctttgcagaaatgtttgtttaggtgttcagcccattttgtaattgggctgtttgtttcttttgttattgagctgtttgtacatttttgaaattaatcccttcttggtccttctctcagtctgtagtgtgtcttttaatttttttttttttttatggtttcctttggcgtgcaaaagcctgtaagttttgattaggtcccatttgctagtttttgtttttatttctgttgccttgggagagtaacctaggagaacattgggtaagatttatttcagagaatgttttgcctttcttctcttttaggagtttttaatgtgattttaaaaagaattttcattacttttccctttctgatatttcattgtacgtgttaaaaaatgcaacagatttctgtatggtaatcttgtatcctgctaccttgctgattttatcagttctagtagtttttgtgtggagtttttagggttttctatatatattatcatgccatctgcatataatgacagtattacctcttcctttccagtttggacatcttttatttttcttatctcattgctgtggctaggacttccaatactatgttgaatggaaatggtgagagtgggcatacttgtttcagattttagtaggaaggctttcaactttttgcttttgagtactatgttggctgtgggtttgtcacaaatagtttttattatgcttggatatgttccctccatatccactttggtaagaatttttatcatgaatgggtgttgaattgtagcaaatgctttttctgcatctgttgaggtgatatgtggtttttgtcttttgtcaatatggtgtatgtgttgaaccattcttttgaccctgtgatgaaaccagcttaatcatggtgtatgactttttatgtgttgggtttgatttgctaatacttccttgagaatttttgcatctatattcaccagaggtactggcctgtaattttcttttttggtaatgtctttgcctggtatcagggtgatggtgatgtcatagaatcactttgggagtgttccttctcagtcttacagaaaagtttgagaaggattggttcaagtttttctttgtatgtttggtagaattttccatttaagccatccagttctgaacatttgtagggaactttcttttttttttttagtaatattttggtccctatactttaaaaaaattttaaatttagtttttaattgaaggatatttgctttatagaattgtgttggtttctgcccaacatcaacatgcatcagctataggtatacatatatccactcctatttgaacctccctcccaatcccattcctctaggtagttacagagccccagtttgagttccctgagtcatacagcaaattcctattgactgtctattttacgtaatggtaatgtaagtttccatgttactgtctccatacatcccaccctctccttcctccccatatccatgtccataaatctgttctctatgtctgtgtctccattgctgccccaaataatttcatcagtaccatctttctagattccatgtatatgcattagtataaaatatttgtttttctctgtcaaacttacttcacactgtataatagactctaggttcatccacctcattagaattggctcaaatgtgcttctttctgttgcagggagtttttaaattacagtttctatttcacttctagtgatcagtctgttcagattatctgtttcttcttgcttcagttttggtaggctgtatgtttctaaaaacttgtccattttttctagattgtttaatttattggcatataattgtccatagtattctcttatggttttttgtatttctgcagtattggttggtatatttcccctttcatttcttgttttatttctgtcctctctctctcttgttcttggtgagcctggccagagattgtgcactttgtcatttcaaaaaaccaggtctcagttttattgatttttttttcctatttcttaatatctattttaatttatttcctctttgatttttattaaatctctcttccttctgactttagcttttgtttgttcttctgtttctaattctttaggtaataggttaggttacttgtttgagagtttttcttgttttgtgaggaaggcctgtatcactgtaaacttccctcaaaggactgcttttcctgtatcccatagattttgtatatagttatgttttcattgtcatttgtctcagggtatttttaaaatttcctctttgatctcgttgatccattttttttttcttaagtagcatgttgtttagtctctgaataatcactttttttcttgtttctcagtggttgatttctgacttcatgccattgtggtcagaagagatgtttaaaataatttctgtcctttaaaatttgttgaggcttattttgtatccttcagttcagttcagtcactcagttgtgtcctgactctttgcaacccgtgaattgcagcaccccaggcctccctgtccatcaccaactcctggagttcactcaaactcacgtccattgagtcagtgatgccatccagccatctcatcctctgtcgtccccttctcctcctgcccccaatccctcccagcatcagagtcttttccaatgagtcaactcttcgcatgaggtggcctactatgggtctaacctagagaatgttttaattgaaaaggatgtgtaattgaaaagaatgtgtagtatgtgtatttgggggatgtaatgtgactgatttcaaatcaggaaaggagtacgtcaaggctgtatattgtcaccctgcttatttaacttacaccctgcttatttaacttacaccctgcttatttaacttttatgcagagtacatcatgtgaaatgccaagctggatgaagcacaagctggaatcaagattgccaggagaaatatcaataacctcagatatgcagatgacacaaccttatggcagaaagcaaagaactaaagagcctcttgaaagtgaaagaggagagtgaaaaagttggcttaaaactcaatattcagaaaacgaagatcatggcatccagtcccatcacttcatggcaaatagatgggaaaacagtggaaacagtgagagcctttattttggggggctccaaaatcactgcagatggtgactgaagccatgaattaaaagagacgcttgctccttggaaggaaagttatgaccaacctagacagcatattaaaaagcagagacattactttgccagcaaaggtctgtctagtcagagccatggtttttccagtagtcatgtatggatgtgagagttggaccataaagaaagcttagcgccaaggattgatgcttttgaactgtggtgtcagactcacaaagagtctgagcatgaatgtcctgaaaataccaattaagtctaactgttctaatacgtcatttaggacctctgttgccttattgattttctgtctggaagatttgtctactgatgtcagtgaggtgttaaagtctctattattgtattccgatccatttctccctttaggtctgttagtatttgttttctatatttcggttcagttcagttgctgctgagttgtgtccgactctttgtgaccccatggactgcagcatgccaggcttccctgtccatcaccaactcccagagcttactcaaagtcatgtccatcgatcagtgatcccatccaatcatctcatcctctgtcatacccttctcctcctgtcttcaatcttgctcagcatcaggatcttttcaaatgtcagttcttcgcatcaagtggccaaagtattggagtttcagcttcagcatccttccaatgaatattcaggaatgctttccattaggattgactggttggatctccttgtagtccaagggactctgaagagtcttctccaaaaccccagttcaaaaacatcaattcttcggcactcagctttctttatagcccagctcttacatccatacatgactgctggaaaaaccatagctttgactagatggacttttgttggcaaattaatgtctctgctttttaatatgctgtctaggttggtcattggcttttcttccaagaaacaaacattttttcatttcatggctgcagtcaccatctgccatgattttggagccccccaaaataaaggctgtcagtgtttccattatttccccgtctatttgccatgaagtgatgggactggatgccatggtcttcgttttctgaatattgaatttgaagccactttttccactgtcctctttgattctcatcaagaggctctttagttcttctttgcttcctgccataagcgtggtgtcatctgcatatcttaggttattgatatttctcctggcaatcttgattccagcttgtgcttcatccagcctggcatttcgcatgatgtactctgcatataagttaaataagcagggtgacaatatacagccttgatgtactctttttcctatttggaaccagtcttttgttccatgtccagttctaattgttgcttcttgacctggaaatagatttctcaggagacaggtcaggtggtctggtattcccatctcattaagaattttccatagtttgttgagatctacacagtcaaaggctttggcctagtcaataaagcagaagtagatatttttcttgaactcacatgctttttcaatgatcttgagttattggcaatttgaatattggcaatttgaatattggcaatttgatcttgggtccctctgccttttctaaatccagcttgaacatctgtaagttcatggttcatgtactgttgaagcctggcttggagaattttgagcattactttgctagcatgtgagatgagtgcagttgtgcagtagtttgaacattctttggtattgcctttcttgtggattggaatgaaaattgaccttttccagtcctgtggccactgctgagtcttcaaaatttgctggcatgttgagtgcaacacttttcacagcatcatcttttaggattttaaatagctcaactggaattccatcacctctactagctttgttcatagtgatgcttcctaaggcccacttgacttcacgttccactctaggtgagtgattacaccatcgtgattatctgggtcgtgaagatcttttttgtatatagttctgtgtatttgccacctcttcttaatatctctgcttcttttaggtccatactatttctgtcctttatcgagcccatctttgcatgaactgttccctttagtatcactcattttcttgaagagatctctagtcttgcccattctgttgttttcctctatctctttgcactgatcactgaggaaggctttcttctctctctgtgctattctttggaactctgcattcaaatgggtttatctttccttttctcctttttctttcacttctcttctcagctatttgtaaggcctcctaagacaaccattttgcctttttccatttctttttcttggagatggtcttgatcactgccttttgtactatgtcaggaacctccatccatagttcttcaggcactccgttagatctaatcccttgaatgtatttctcacttccactctataatcataagggatttgatttaggtcatacctgaaggctctagtggttttccctgctttcttcagtttcagtctgaatttggcagtaacaagtttatgatctgagccacagtcagctcctggtcttgtttttgctgactgtatagagttctccatgtttgtctgcaaagagtataatatttttatatacttatatgtttttacatttataagtattttaaatatttaaatataattttaaatataaaaatttatatttataaatatgtatatatttatataaatttagatgctcctatattgagtgcgtatgtgtcattgaatgtaatatcctcttcatgtattgattcttttatcattatgtagtgtctttctttagcctttttatggcttttgtttggatatctgttttgtttatatgagtgttgcatcccccactttattgtcattttcatttgcatgaaatacctttttccatctccgtactttccgtcctttgtcctggagtgtctcattggtttcttaaaagaactaggttttggctttattgagccactattatatttctgtttcctcttgcattatttgttgtttttaacatttttttaaagatatatttatttttatttatgtatggctgtactgggtcttcattgctctgcacaggccttctccacttgtggtaagtgggggctactcttgatgcagtgcatgggcttctcattccagtggtttctcttgttgtggaccacaggctgttgatgcatgggcttcagtagttgcaactcatgggctctagagctggctcagtagttgtggcgcacaggcttagttgtcccccctcatgtgggatcttcctgaaccagggattgaacctgtgtctcctgcattagtggattctttaccactgagccaccagggaggtctgctcttacctcttttttttctcctttattcttgtgtgatttattttgttgtttttctaacgttcttactagttgagatggatgtttacctaattaattttcagttcttattgtataaaaatttaatttctgatatatatcattttatcatacaattctaagtatttctaaagttccattgtaatttttcttctttgaactgttttgtatagaagtgttttaaaaatatatttccaaatgtaagagaattttaaaattgtataattgagttacactatcatattaattttcagtatatatagtgatttgctatttttatagactatacaccatacagagttagtataaaatattgactatactccttgtgctgtatattacatccctgtagttccttgtaactagtagtttgtacctcttacctccccttcacctatttcataccttcctcacccttctcccatgtggcaaaccactacttcgttttctatatctgttcatcttttctgtttttgtatatctgtggacatgttttattttttagattccacatataagcaaaaatatacagtatttgtcttctagtaacttttaatttgattgcattgcaattacagaattttgtgtatgtgatactggtttttgaaattgttgaatttacattttggccttccatgtggttggtttttatgaacattctattgaagaatgtcacttgtttggtgtttttagttctgtggatttttacagtgttctgtggatgattgtaatttatctgttctcctttgactgtttttcttggctgttatagacagtgcttatcaaaacatttttatgtgtatctgtgttaccgtgtgagtatatccacaggaaaaattatactagtatattttcaaaaagtattttcttttaaaattaggatcaagattgatctagtttatagtttcagtgttgtatatgattctgcttgtttccctatgtccttgactagtcttggtattaaaaaaaatatttattggaatatagttgctttacaatgttatgttagtttctactgtacagtgaagtgaaccagttatatatatatatatttccacttgtttggatttcctttccatagagcaatgagttccctatgctatatagtaggattttcattagttacctattttacacatagcatcaatagtatatatacatgaatcccagtcttcagttcatccttccccccacccctgcctcttggtatccatatatttgttttctatgtttgtgtctctatttctgctttgcaaataggttcatctataccatttttctagattccacatttatgcattaatatatgatatttgtttttatgactattcattctctatgacagtctctaggtacatccatgtctctacaagtgacccaatttcattcctttttatggccgagtaatattctattgtctgtgtgtaccacatcttctttattcatttcctctgttgatggaacttttgcttgcttccctgtcctggcttttgtaaatagtgctgcagtgaacattggggtgcatgtgtccttatgaattatgtttttctctgggtgtatgcccagtgttgggattgctggctcatatggtccttatgtttttagtagtttttaggaacctccatattgttctccatagtgcctgtatcaatttaccttcccaccaacagtgtaagaggatctcttttctccccacactctccagtatttgttgtttgtagactttttgatgttggccatcctgacttgtgtgagatgatacctcattgtagttttgattagcatttctctaataattagtgatgctgagcatcttttcatgtgtttgttggccatctgtatgttgtctttggagaaatgtctggtcttctggtggtggtttagtcactaagtcatgtccaagtcatgtccaactcttgcaaccccatgggctgtaacctgtccatggtattctccaggcaagaatactgaaataggttgccatttatttcttcagaggatcttcccagcccagagatctaacctaggtctccttcattgcaggcagactctttaccaacatagctatgaggaaagcccatttaggtcttctgctagatttgtattagcaaactgttcaagtcagtcatggttgggaaaagtacattcttcttttgattttcagtgtctttaattatgactgagagtcagcattttttttcttttggaggactacctattcttatagcccatttttctactagtctactcatctttcttattgctatgtaaaattcctcctatgccatgtgcacggcacatttagatggtttaaagcttacttaccaccaggatagttttttgttattttgacttgcttcacatgttacttactttagaaatgggtgatggatcatctcgaagagatcatttcatgagaagtggatttgcctctgggaggagtttgggaaacagaggtaagtatctttctttaatcatctattataatagctgaatagtggaatgaatagaggcttttatggttgtttcagttcagttcagtcactcagtcgtgtcctgactctttgcgaccccatgaatcgcagcacgccaggccttcctgtccatcaccaactcctggagtttacccaaactcatgtccatcgagtcggtgatgccatccagccatttcatcctctgtcgtcaccttctcctcttgcccgcaatccctcccagcatcagggtctttgccaatgagtcagctcttcgcatgaggtggccaaagtactggagtttcagcttcaacatcattccttccaaagaacacccagggctgatctcctttaggatggactggttggatctccttgcagtcccagggactctcaagagtcttctccaacaccacagttcaaaagcattaattctttggctctcagctttcttcacagtccaactctcacatccatacatgaccactggaaaaactatagccttgactagatggacctttgttggcaaagtaatgtctctgcttttgaatatgctatctaggttggtcataactttccttccaaggagtaagtgtcttttaatttcacagctgcagtcaccatctgcagtgattttggaacccccagaaataaagtctgccactgtttccactgtttccccatctatttcccatgaagtgatgggaccagatgccatgatctttgttttctgagtgttgagctttatgccaacttttcactctcctcttccactttcatcaagaggcttcactttcatcaagaggcttttgagttcctcttcactttctgccataagggtggtgtcatctgcatatctgaggttattgatatttctcccggcaatcttgattccagcttgtgcttcttccagtccagcgtttctcatgatgtactctgcatataagttaaacaaccaggtgacgatatacagccttgatgttctccttttcctatttggaaccagtctgttgttccatgtccagttctaactgttgcttcctgacctgcatataggtttctcaagaggcagtttagtgcaaggtaaatctgatataacttagtgtatagtagactttgttgggatgatgaatttttttttcaataccagtattcttttcactgttttactttttaagatagtagaaaatagttgaattgattagatgggtagattgattaaagagagttgcttcctagagcagcttcctagagcttctgcttaatgtgttgatggtttttgttcccatttggcatgggaggaatgagagaaactccagagactagaatgtgaaggacctctttcttaagttttatgtttctcatgaaaatgcagtatgtgaaacagttctgttagctcgctagtattaagaggttgttttttcaaaattcaaagtttttattgtcacttttagaacaaccagcactagatttgacagaaaatgacccagcaaaatactttcctccattccatttttagatttgttgttaaaatgctgaaaatattctcactgtattttagtatagtgcaacaaaatattattagaacctcaaatggtcatatgaatttttaaataaatttcttttatgggatgccgtaagctaaggttaatagttttaaatatacatgatacttattcttgaatttattaaatgttagtttttgaaaaactttggtatttctatatgtttttattcattggcaactgaaagttggtctatggtatttcatttgctacttggaaaacttaattttttaagatagagttaacataagtgtgaattttatgctttgacatattctactaatgaaatttgttgaagatacatatatattttttttgtttttaagcctgcatattaagtaagaagcattaatgttttggaccatgtagttgtacttagagagtcaagtgtgtattttgtttgctactactaagaagtaacaaataccttaatatgacactcagggaactacttaatatttggatatattttaaaatcctaatttagaatgatattttttgatacagacttctaaacattgttgaatagagcctttttaaatgagaaaaccatcactgagattttactatgaattgttatattgtagatttaaatacattaaatttctgatcaaaactctctgtgaacattgatactttaaaaagttatttttgaaaaatctgaaaaaggatgaatatatgtatatgtaaactgaatcactttgtatacctgaaactaacacaaaattgtaaattaactgtactccgataatatttaagaaaagaaaaaagttatctttaatactgcatataatcctggaaatttatagaagaaccacacctatcccaaatgattcagtttaacattctagttcgtttcaatctctatggtattttttttcacaacttggatatatctagtaacgtggttctaaaattgacttttaattacctaacatatatattgactagctttttatcttctgtgaagtatggcctgaaaagccttagctttctgaatcacatgcttttttagcatctgataaaaatactgatagttgcatatacacagttttacatgtggcattaggagtttcacagatctcttagctcctctgtattaggatattacagatgtagggaagataatttgtgaaagtaacaagataatgataattatcccagtgataatttaaagtggctatttataatgttttgggtgcttaagtttatgttttaaataactgtgctgcttagcatagaaactctgccctcaaaattcttaatttagtggtagagaagcacatggaaagaaatattgcttaaaaagagatacacatagtatgctgtgggaatgtgattgatgaattgattacagttggaggactgaaggaggacttcacagaagaggtgggttttgaatcaggcttttgaagagtgaaaagaattttgctaggaaaaataggaaagcaaggaatgtcatgctgaaggaatagcatgtaggaaatagaatatattagaagttcacagtgtggagtatgggaagttgttttacgagttaaaatgttgggtgttcagagttgtatcagtcagttcagttcagttcagtcgctcagtcgtgtccgactctttgcgaccccatgaatcacagcacaccaggcctccctgtccatcaccagctcccggagttcactgagactcacgtccatcgagtcagtgatgccatccagccatctcatcctctgtcatccccttctcctcctgcccccaatatctcagagttatatagtgggatattgccggggtccagccccggtggatccagggaatttgaagcggggacggcgttggcgaggatcaggaaacaactgcttaattaaactttaattaaggatataaagagtaatggaataaggatagctcagtgaggaaattcagtggagaaaagaggctgaataattcagccagaaggtaagagaaagaacgacatggtgagaccaagtttcggtgaacaaggcccgcactttattttccaaagtagtttttataagttatgcatagaggataatgggggaaggggtagagtcatgcagcaagccaggctttcttcctgcaaacttatcatatgcaaaagcttaggtgatttgcatcatcttctggcccggaggcctgttaacattttaagaccctttcttcagaaaacttatttttctctaaaggtgactggtcaggagccaccctccaaaagcattagataaagttgcattcctacagagcaaaggtgtggtgggctataacaagaaaaagaattaactcaagggtcccaggttacaaacattaaagctactacttacaccaattatattaatcaatacactgccagggacacagcaggtaagggatatggaaacttaacagcaaacattggcccaacaagtgaaaaacccttcaccaatacaatttctaatcaatcttttaactactcaaaggaatctgtgtttagacagtttagaacatctcctgcctctcacagttgggaggctctgaacaatcacatgttgccggaaaaaacctattcatgcaggctagaggacttccaaaggagtttgtaggttaaacactgtcacacccaggaattattaactggagctgtaagctaactcttttttcagagaggtagtgggggacagccccccgtaaagtcagaggtgtaggtgaaagcacaaagcagaaagtaggcagactctggttttgggtgtaaatgctcgaaaatttccagggggacccctgaggctcgatcccgcctttgcgtatgccgagcctccttcctcatgacctttgtcatgggcagagttcctcacactggctcccagcagtgatagaattccagttgagctattccaggtcctgaaagatgatgctgtggaaagtgctgcactcaatatgcaatatgcactcaatatgcaatatgctggctcccggcaggatataaaactaagaaggttgatatagggaaatactatggaggagtgggaaataaaaggaaatggtattagcatttttttgttattatatagctctttcttaattctaattttaaaaagtagattgagagtgatttaagtactggaaaaatgaatcgggacttccctggtggtccagtgacttaagactctatgctgccaataccaggggccctggtttgatccttggtcagggaactagatcccatatgctgcaactaagagttctcatgatgcaactaagacctggtgcagccaaataaataataaatatatttttttaaatgaataaataataattaaaggacaagagtatagaattttcattagcagtgactttcacatagaggtatgtgatctatctaaatagctggatctatcaaggtgaggtttcaatatatagaaaatcagagttgaatagagttcaattgtagagttgaatttcctggttaaagttctctagtaaaatagcaactagttgagagctgtatttcagcaatagtatatttacatttttagtttggtataatgtaagaatttttaaaaaagaagttgcaggtatattttaattttataagttcctgtaatactctctcctcatccttgtaagttcccttaccacacagattcatttaattcctagttattgatgacacacttgattttatactttaaaaagttttaattttatctgaactttttcagatcctggtgagtctaataaaagagagaatacgtccacagtgggtggttttggagttggaaagagttttggaaacagaggtaatctgcttatgatgtctttcaattgaaacttaagtgacaccttatagtctttgagttctgtttccttttaagtgtgtgcctttcccaagaatttatggagatcacaagggagtgctttcactttcctaatcatagtttttagcaacactttatgctgctttggatgtgtttgctattctgtttagttctcttgttttcctttttaataaccatgctacttgctgcagcatctcgtcaaattgctttaccccacaggtgaaccccacgtcttttctcctgtactcatgatttccttgccctgcttctgcaacaagagatctatcttacacttccaggggtgaacctgagtttccatctgtacttgaacaaagaaccagtggtggtggtttagtcgctaagttgtgtctgactcttgcgaccctgtggactgtagcctgccaggctcctctgtccatgggattctccaggcaagaatactggaatgggttgccatttccttctccaaaagaaccagtagaagttttgaatttgcattttgtttctaaaaaaatttaaaaactataaagtagaacttacatagagtttaagatcaaaaccaatagtacgtagatggaagacttctcaagcattttggagacttagcacttgacttttctgggaaaggtgtatggagggaaaggggcaattgtagagggcagtagaatgtaatccttttctgaaccaacttcaaagattgcaaatatttaaatgaataaaataaccaaaaaatctgttttgttatatataatctttttgtaggggctgtctttattttgaaattatatatctgcttaaggaaaaagtgttatccattcatatatagaggccatatggcctctatatatggatacttacttttttatatgctaattatatattaaatgtctctgaagtttaatgctggaacatgagattttgttgagcctgagatgttaaatgacttaatatgtagacaccttgcatataaatttaatgtctgtcaaagagtaattgattggtctctgtactattgaagctgtaatttaatatattttatttaaattagatcatgattgatagacattgcatattgacatttaagttacattatctgagtaacttgtagttacctaggtaccctgagtatcacttcagtaaagatcattttattaagactaatattttttaaaatgtatgaaatattactgatggatgcttttaaagtgaactttagagctacatctatatgttccagagatgcatacatctagacacaaggttttattcaatgagaaatttgaaagcagactttggtgaaagattgtttttaaaattttattaacagaagttggcagaatctccttgatactgagaagggaaaaatgatatgatattggattgtaatttagttgtcctccagcagatgagagtataattcataaaattcataaaaatttgatattttgaatagaaagtacatagtggttatagtgagataggcacacgcatacccatgtttcactcatgtacatatggaggaatatgtaacattttaggttatataagattggctggtattttaatcttaaactgacacaaggcagaagttggcatacaatgcatatgcactcatcactatttatatatatagttgtatgtgatttatacagttttaaagggacatcataactgtcagtccctgtaaggtgtgtgtttctctgtttctctttcttctgcagaagaaattggtttttggtcatttgatttaggtaattgttttcagaaatttgcgagtttaattttatgttttgtgtaggtttttcaaataacaagtttgaagaaggtgatagctctggtttctggagaggtaagttcactgttttttgtagtgacttaagaatttagcgtctagaatacatgttaaggagaaaatataattaagtatcttaatctgttccagctctgatttatttaaacacagttttataaagcaactatcagtcagttcagtcgctcagtcgtgtctggctctttgtgaccccatgcactgcagcacgctgggcttccctgtccatcaccaactcccagagcttgctaaaactcatttccatccagtcagtgatgctatccaaccatctcatcctctgtcgtccccttctcctcctgccttcaatctttctcagcatcagggtcttttctaatgagtcagttctttgcatcaggtggccaaagtattggagcttcagcatcagtccttccaatgaacattcagaactgacttcctttaggattgactagtttggtctccttgcagtccaagggactttcaagagtcttctccaataccacagttcaaaagcatcaattctttggtgcactcagctttatttatggtccaactcatattcatacatgactaatggagaaaccgtagctttgactagatggacctttgtcagcaaggtaatgtctctgctttttaatatgctgtctagcttggtcatagcttttcttccaaggagtaagtgtctttt

SEQ ID NO: 36 - protein, 729 aa, Bos taurus
MGDEDWEAEIIKPHISSYVPVFEKDRYSSGANGDTFNRTPASSSEMGDGSSRRDHFMRSGFASGRSLGNRDPGESNKRENTSTVGGFGVGKSFGNRGFSNNKFEEGDSSGFWRESSIDCEDNQTRNRGFSKRGGYQDGNDSEALGSSRRGGRGSFRGCRGGFGRGSPNSDYEQDEGTQRSGGIFGSRRSALSGAGNGDTFQSRSGGGSGRGGYKGLNEEVITGSGKNSWKSEAEGGESGDTQGPKVTYIPPPPPEDEDSIFAHYQTGINFDKYDTILVEVSGHDPPPAILTFEEANLCQTLNNNIAKAGYTKLTPVQKYSIPIIQGGRDLMACAQTGSGKTAAFLLPILAHMMRDGITASRFKELQEPECIIVAPTRELINQIYLEARKFSFGTCVRAVVIYGGTQLGHSIRQIVQGCNILCATPGRLMDVIGKEKIGLRQVKYLVLDEADRMLDMGFGPEMKKLISCPGMPSKEQRQTLMFSATFPEEIQRLAGEFLKSNYLFVAVGQVGGACRDVQQTILQVGQYSKREKLVEILRNIGDERTMVFVETKKKADFIATFLCQEKISTTSIHGDREQREREQALGDFRCGKCPVLVATSVAARGLDIENVQHVINFDLPSTIDEYVHRIGRTGRCGNTGRAISFFDLESDSQLAQPLVKVLSDAQQDVPAWLEEIAFSTYGPGFSGNARGNVFASVDTRKNYPGKSSLNTAGFSSTQAPNPVDDESWD

SEQ ID NO: 37 - DNA, 32284 bp, Mus musculus
ctctggccagtacccagacaggggacgcaccaggctcgatcggtccaacctctgggaagatccccgcccttcagcgcgctcccgggtctcccagcctggactcggtgcgcggctctcctccccgaggctccggaagggaaggaggcgtgtccggagctggcgggcgggcgggagggagctgtataaaaagcgctggcggcgcagcagccggggcttcatttgctgtctgtcaccgggaccgagagtgccgcgggaaagcaacggccaaggacggggcgctgcgttcgagctacccaatgctgggactatctgcagccgctgctggtgcaatatgctggagctccagaacagctaaacggagtcgccacaccgctgcctgggctggatcgcagcgctgcctttccttatgaagaagacacaagtgagtagggcacgcccgggaggagctcggaagctttccaagaaaatcgctccgggagccccggggagcccggcgcgctctgggaccggcaaccaggccatgtggggctgcgccctcccggtgagccaggagggtgtgggagagacaggcgtggtgtgagagcccgagccgccgccccaggggtgagcccgggagctggggagagccagggctgagagtgagcctgtggcaagtttgcagccgcagctgcgaagtttgaagctgtcagtggcaaaccgccgatgcaggctacgcttcctccgcctgggtgttggagttatcaccgggaaggcttgggtttcttatttaattttttaatttttttggaccggaggtctttccccgtggattcggggagattatgaaacagcttcccacgcgccaccctcgctcgctctcgcaggcagatttatctgtgcagtccccaggtgggcgcgggacgcggtgcggacgcgggctcagccgctggagcgaagccaacccagagctcctaggcggcagcgccaggcggggtgcagaacctgcccggcaggcggggaaaacttggcagcctgcggtgtcggccgggttcacagctctgggtgggccctccagaaagctctagatggagtagtagtacttccacactgcatgacaagacaacctctcccattacagaacagcaaaagttcttttcttcttcttcttcttcttcttcttcttcttcttcttcttcttcttcttcttcttcttcttcttcttcttcttcttcttcttcttcttcttcttcttctactcctcctcctcctcctcctcctccctcttcttcttcctacttctccttttttttttaatgtgcacctcctaaagatagttattgagataatgcccagggtctctaaattgcgctttatgcataaaacatagcccgggggtacaattatgtcttttcttcgttgacgggggagggtgtatgtgtggaaagagccactgtagtaattctttctcctctatagttctttctaccctctaccctcgcggttgctacctcttcatggttcttcctttctgaagtgttctgtctgcagcaggttgggtaaagctgttctttcaggtgccctgctccctccattctataggtgatgtaaatttctgaaatgtatggaaggggatgggatgggaggttttgtgctcattttcagcattgatgaaggcatcagtgtgttggaggtaatttattaaattactcataggacgtcttattttaaatagctatctaggctgggataccgacccatgaggaaacagcaagaataaagcaccttttcctggcttggaaacagatagggggagggagcatggcctggcatcctggaggtgttctgcttagagcagctgccctgagtcaggctcaggagaaagggaaggcaggtatctggccctgcgtgcaggttagttttaccccaaagcatcacacctcaaatccctgctcttgaaatgaggatgttaagggtttctgcaacaaagaaaagtttcgccgtgattgcttggtgtgtacatgccttctgcttggtggaataataaacaagggtggggtacctattcctttttttaaaagtagcatccgctcacatgaataatggtggcggctctgagtgcagcagcctctggtacaggaagagagtccaaccaagtcttcttatttaaacaagaaaacaggagacggacaaggttaatgtccaacacgccaaagcagagagcagttgagagtcagtaggattgatgatccctgcgccctctttgcaaaacgagcgcgagccctgtaatctcttttcccgctttgattaaatggctgtgtaaataggattacatggaataattccattgaaaactagaaagaggtcgatctagcccgaaacactgtggaggtggcagcagtagtgactcagtgctgccgaccagagatatttgagacagttaagtattttagaaatgtgacctgtttggaccaagttaaagtgcaggccctttgggggggggcatgctgctgataaagggtttgtaggcaaaaagagggcagtgctcttattgaatggaggcattcattgtgtggaatctaatgaccttcaaggtttcctttaaggctacttctagaaattcacattcttgtccctgaaaaagaagacactggaaagagctcaaaaaaatcaataaaataacccattgcagtgagggagggggttacattctctttcctatggtcaaatctcctaatccaagagatgcaaagaaaatttctgggccactctgaatgtgtagagagagaatagtgtaagggaactggacacaagcaagatccagacttctttgcttttaaaatctgatgttatctctgcctgagaggagaatctattgttacaaaatagtctactgtaaatatgggatcaataccaacttcccttataacccccacccccgttcaatatgcttttcattacccagtaaatacaaaataatgaaatgttaatattttaagggattttaatttaaatttgatagctttgaaagaataatggggacaccgggacattttgagccttcagtcaagctaagtaagtgtgaaaattccatcagcagccacttggggcttgatggatgactctttgatttactttagcaccagggatggacttcagtatttgggaaataagcacacaagtcccaaggagcaacgggggggggggggggggggggcaacaatgtatgtcttaagtttgtgatgccgaatgcgttttgtatttttgagatttctctttgtgtctgtgtgtgtgtgtttccaaattgtaggaatttatggtatctaaaaaaaactgtgactctggcttagaaacagctagcagctacttattaggattctaatcgttacattacaattgagaggccatcctgtagtgccggtggccatttacgtaaaagtgcagtcagcagtatgtgctcatgatcatgactgctgtgcttacatttttttagtttccccacaggtttccagagttgtggtgagtgccgtcagtctcagaaataaggagacaggaaagatctgtcttgaaaacaatgcagaaaaggtctatttcaggaacactgaagctcccagaaaagaagcaaatagaattttagcttttactatactagaaaaaaaaaatccttttttttttttttttttttttttttttttgtcgatgaagtatttgtcacgtgggtgacaactgtggttactctatagaaaaattaacatatttgtgaaaagagcatttgaacatcttgtccctgcagtcactcagtttgcagtgcgtgtttccaatggttctaatttatgtggcttttaattgatacgttctgccaagactttcagactcaagtgctaagtcgattacgtttcacataaaacagggaaaataaccatatggaaatctgaaagtcagtgccaaaccaattaaaattgctaaattttatttatgtctaactgtttgatgggaagatagcgaattgtgagcgcacgtttgttctttaatgacaggtgactgattgatcgaaatcttaccgctgccttaagtaacattagaaatcaaatcgctgccaaaatagctagtctttcagctttggacgtttctttcatgtttcttatcctacctctccctgttggtggagcactaaaatatgctcagtgggaggactctagtgaagacttaagctgatgcctgttttaccacttgtgacacaaacgaccttaggcaaacggtagctccgtatttccgttctgttatctgtatgatgtttgtgaaatagttataaagatgtctctcagatggtggctgaaaggactcctgggaataaacagctctgcccctgcacagtagctcactggtattacagtgtgaaatacattccccagaagggaactgcctttccaccagcttaaaagccagaggaaaatgacctctaaggagcaaagcagagagcaagctcttctaaatctggatcctttaattcagtgcctggccttcattacaagctgaatgtctgattagcagttttccttaacacagggccaaactaggagttgtgcagaaactaggctggtgtgcgggacccgagaatgggaggctctctgcagttctatttcaagttggaagtacaacagtggagaactagggggccaaacaaaagagggagggctcccttgatttactttcctgtttgtatgcttgtgctaagttcgtcctctgcagttctgaggtctgtctttttttagactaagaagaattggccagcctatccctgctcttggacttgctcttctaattaagggtacacatccctttcttctttgttgtttgaacccattgacagtcagtggtctttccccttcgttatccaagtctgcagacaaccacaacctccgtttccctcagctaccttacttaatggtgacatccttagatcagggtaaggtttggatagaaatctctgagtagagatctcttatctgttaagtatgtgtgactcacggagcagctgcagaagttctgcctttgagattagtcacctgaatggtgagagagaacacccagatgagattcttgaactgtgttctcctttcggggctgttgtgtatgcatagactctccttgggggggggggggaacattgactcgtgccttgctgatttatagatgctgccagccaatttgccctttcatttaattacaggtatacaaaaaaaacaaaacaaaacaacaacaacaacaacaaaaaccctgtttgctggggccaggcctggcatcatcatccttcccccctatttcttctgtccatcgagaaaaggaggtggagcatttctcatagaactatgccacctggttctttggggttttttgttgttgtttttgtttgtttgtttgttttgttttgtttttgtttttcaaaaagtgtgacacgtgtcacccaagggaaacctgttgtattgctctgtgtcctttggctatattttcctgcttgttttcaggcttctacacgagcttggctgttagggagttgtgttcttttcttaacttgaatattgagctgtgtgactttggggaaattatttggacctcactggacccgtttcctcgactcaaggaaaggaaggtagggctggttatttcgaagtgcctctgcttgtaagtatctttctcttctaaagtaagactaataagagagaagtttgaaccaggtgacacaggagcctccgttagttctcagatttatgttgcttcagtgtgaatacaatatattactattgccctatgatgatgaactgggtgatgaggaagacactatgatttaactttagactgttcttcaggaattccatctactgaatccaagaatgcgatttctacttgaagagacttctactctcttctcatcatctgagtgtggaagactcctaaacagaaccagagagttccaggacacacattttccgagacagtgcttccctgaatctacctgccaggctgcaacatctgtatggggtgaatgtagaaagccaacccaagaccattttggtgatgtggcagaaaatgtgaatagaggaacccagaggaaggggctgcggaccttgttctgtaaccaggcatgtggccttggaccagccattgagtcttacttagtatctctgaatggcatccaagagttaatactgagaagacagtagagatcagaggtggcagctgaggccacagaagtgaacaaaacagagagccttgggggaaggctagctctgtggtgatgtttcaccaagttgtcgattgcctcaggtcccccccaccccgcccccgacacccccaggttccagagtgtctctggtgcaatccctctccatctaatttccttggctaatactagacacaggactcatggccaacagcatatattctttagatgtcagaagccactggttctcctcattgacatcagaatattcaaaagccagctggaccttcctgcagccaagagactagagatccctctgaaagccttgccacggcagtggtactactgctgaattctgagggctgccagagtgtaatgagatgcccgttaaaagaaagttcacaatcaaggcgacactccagacaattaaaacacaaagacagcagcaatagctgtcctttggttatctggatgcaaatttagcacttgactctgcacctgtagctgttggctgtgcttggctctcttgaggggctgtggattaaagcctgctcttaggagagtgattaggtggcctttttgtgtgtcctctgtacacagacggcagctgaaacatctcctagttccctcgcaaagaatgcctttgctcgctagggtaaccgcctgagaaaaagggtgtgaaaagaactcaggcaaacccatctgtccacagtatccacatagaaaagccagtgtgggtcgtttttttgcagaaagggcatctctggtgtgtagctgtgttgctgtgtaaaccctggagggaagagcagagcctggccagtgggtgtgggtgtggggtgggggtggagttggtttgctttgtacacactttattgtgttaccaccagcagttcatcttaggaacaaaagcctcgagggtgtttagaacctcttcgttttttcaccttgatgtgtgtgaaatctctgaagcaaatgatcatttccatttcggtgtgcttccagggtaaattccatctcattactgctttgtgtgtgtttgtgtgcacatagacaggattgctgccaacactcagaactgcagagggtccacagaaacgccactttgatgagctttgtgcttgctgtattctgggggtcctcaccacccctagcaactaccctgtaagaaccacaccaattcctggattttgaagaagagggttaccatagaaaacatgcttttgttgtaaaggtcttgctgcaccctggcatctcttctgtgggtctcctgcctattaaactttcaggactgttagctggatgagccctgggaagggagagtagaaatataaaccagtttataatatgatctaggaatcacaaggatggcaacacagagctcaggagtcaaatgcacagccattacttatgcttccatataaccccacactttaacacttgtgaaataataacacattaggcagttctagttttcacgaccgagcaaacctctgcggttgccttggctgggatctgtgatactttgctcaagtttatgttttgtcctataggcctcaccagagacctttggtgtgctctcctggatggcgcactcaccccttcaccttgctctcctgggtagatcactcaccccatctccgtgctctcctgggtagagcactcaccccatctccttgttctcctgagtggagcactcaccccatctccttgctctcttcggtggaacactcacctcttcaccttgctctcctgagtggagcactcattccatctccttgctctcctgggtggagcacccaccccatctccttgctctcctgagtggagcactcattccatctccttgctctcttgggtggagcactcaccctatctccttgctctcttgggtggagcactcaccccatctccttgctctcttgggtggagcactcacctcttcaccttgctctcctgagtggagcactcattccatttccttgctctcctgggtggagcactcaccccatctccttgctctcctgagtggagcactcacccattctccttgctctcttgggtggagcactcaccccatctccttgctctcctgggtggagcactcatcctatctcctctatctctcctgctgttaagtgtggagaggaacagctgtgccctctgttttcaggtggttcccagcaggggctgaactgcagggtcataaaagtgccaatcaaaaggagaggattaacactgagttttttaatattggatgagatttattttgtgtaaaaataccatttacattggtttttaaatttttatgacaaattagtagttgttgttgttgctttttaatttaagtcctttccaggagtatgttttaaaccttttgtatatatctatactgtctaaaagccacagtgatctataacccaacactacatgggaaccagtggaaacctcgtgtccacttttagagttatgtttggtaatttactaagctggatggttcatgaaaatgtatatctcactgtgaagagttttaatttcaaaactcaggaacagcttctaatagagatagtttttaaatctaccatataaagaaaggcccaggctaagccctttatatcctgcaacattttagacaactacacttttaaatgcaaagctgacttgactacttattctttctgtgcctctgcctacatgggaatgacttggcttgaaggatcaaaatttcctataatccacgtaaagtagtaacaagtgaaactgttttaaagttgccatcattgtttttaaaaaaaactgaaccattctcgtaataaaacacggcaaaacagtgcttaggagaaagtagttccataattcattcattcatttaacttttcttctgggaggtgggtggtatttctttcaaaatttcattttgcagataaggagaccaaaataaagatttcctcaatgaatttgtgatatttgccattattgtcacccaaagagaggtagtgtgactcattagtgtgccttagtcattactttggagatactaaaactgtttacaggaacactaaataaaaagcaaatgtgactcagaaacttcatacagctgccagtaatagaatctggagaaaaagtcatagttactgttgcctagcagagtggctcatgttagatgctcaatcaatacgcaatgaaataaacatgtctgattcaggctgctgattattggcgcaattgtttgctactttttcttttaaaaaaaatactgcgttaaaaaaataggactagttttatatgcaggtaatttttttttcttcgagacagggtctctctgtatagcccaggctgtcctggaactcactttgtagaccaggctggctttgaactcagaaatccgcctgcctctgcctaccgagtgctgggattaaaggcgtgagctaccacgcccagctatatgcaaggtactgagtgcttggtcccaactgtagcacttttaggaagcacaaaaccagcgtttgggaggcgaacctcatcaaaggaggttaggttttaagtacttgctcttgaagggaatatggaggccctggcatctccttttcctttctgataaccaagaagtgaacagtcctcagccacaccaccatactactgatgtacggtgccaccgcaagcccagaaccatggggttaaaatgaccatgcacactactgtctcacagaggactccaagctcaagtgaagcgttgtttgttagaagttaatcatctcaaattttctcccacaactaagaaaactaacataaattgtcaaggtttgagagactgctgtggctgccccccttccccctccctttcccccttcttctaatctccctcctttcaaagtcctcttcctccccctcctccccttcccgctgcacctcctcctcatcctccgtatctgtttgaaccagggaacctgaaatcaagcaaagtggaggtgaggtttcctgttaagtggaaaatttgctttgattccagctcctcagtgctgtgcacacgtgccaatggttatgtttgaacagcgccttgcaagtcagagatcctggccttcgtaggcggctccacaaccccccatttccgcaacagtcaaatggaaacttaatacctaagccctctgactgttggggggggcgtgggggggaagcctactgtaaactgtaaaaaaaaaaatgccattttacttgatggatttgaaagcttagcatctttcaaataaagtaggacttgaaagacagaaagacaaatatttttaaatgatgcttttagatagcttcttggggaaaagagggaagctccagagattactcttatcagttttgctctgatcctatttccaatatttttttaagacaattttaaatctccacaatcagatgaaggaacgttcctaaaaatgcctttgtgattatggctgggatgtgagcctgtaattcatttgtgttgtgttctttgctgtgggatcccttcgctgttcagcactgctgtgcggggcttttatgtgggtgtttggggatctgaactcaggtcctgttgtgttctttgctgtgggatcccttcgctgttcagcactgctgtgcggggctcatatgtgggtctttggggatctgaactcaggtcctcatggttgcacagcgagcaccatactgactgagcatccaccggagcccaaagtgctaagtttttgtagcagacaattgtttatcatccttaggaacattgttgccatgtagctagttaatttgtagtgcctggtgaacaaaaggctcagccaaatagactactccaagtgttctgctcttttatataagccccagtctctgttgccccatttgtcaaataggatgaggatttgtacatttctcataggagactacaaaggataaaagaattaatccacacttgggagttaaagcacttgggccagggcctggtaaaaaggaaacatggaagacccagggaagttataattgcaggaagcaaatgggaattttgtagctgtctgtagtgatgcctcattccctaagccctaactgaagagtgaatgggaagattacaagcaatcatccagtctcaagagagtttaccaagagcaaagttccttttctgtccggtgcccaaggtcacagaagctcactagtggtgggctggttcatgaacctggaggtctgtttccaaagtccacatttgtcagcttggtgcctagaactgaggctggggggtggggaatacacagggttaatcttttcccattttgattcagagagtgattctctaccattttcttttctttttttcttttttttttttttaaattgagatgtcagttttagcattgggagaaatccacttgttgattaagagtgggggaaagtatgacttttgtgtttaaaagcacctaggttttacctctggctctgcctctaggttgctgggggggtcttaggcaatgtatttgcctttgtttaacctttctgtaaccttaggtaaaatggaccaatgagattttgtagcttctctttcttcctaccttgtttgttttctctccctcctttcccttgttccttcactctccactctacccacccccttaaatttagaaataaaatgtatgcaatgaaccttctcaggattgttctatgacgagaaatatttcgcagagctatggacatatgtatggctcagtggtagggttcttgcctaggtgtcaaaggtccccagttctatctctagctataagcatgcaagaagaaaaacatctttcagagttaacatgtttcctactatattgttaaaattcagagggttttttgtttgtttttgtattcttgactgattcgctgtacacacagggggaaacatgagtgagatttagagtcaaaatgagacgtatagctctgtctgtcacatagaccatcacatatgatttcctttctttctattgccatctagattaatagttctcaactttcctcatgctgcaaccctttaatacagttcctcatgttatggtgactgacaaccctaaaattatttcattgttacttcataactgtaattttgctactgttatgaatcataatgtaaatatatctgctaggccagatatctgatatacaacccctgtgaaagagtcagtcatctccaaaggggtcatagcccacaggttgactgagctagatgaagggtatcagagtgacttagagtcagaacacacaggactagatgaggtagtacagaaaaattgtctaactttaggtggcatccctgtaagtcatgtccctgacgactgagatggcacattgactgctctgtcagtttatcccaatgtatagaatgatgatgatcattttaaagttgttttcattgaaaagaaaaggaagataaggggtgatacgagatgtgggattgtgtcactatgaactgcctggctaaaggtatgggtgtttgtaaggatgctgccacaggttgttgaacatcaagagagacatcgatgaaagggggtagtctccatagacagatttgtcctattctgggggcaaaagccatgctatcatcagcctagaatgagggaaaaaaatcaagctatctaaataactctttattactgccttccaaagtgagccttaacctgtttttctgtcatggaggctgctcttcaaattgcgggactttgaggcagtctgcatttctactatttacacttttctcacttgtaaaaagaggccaagagtctaattccgaaggtagttccaagcattgcatgactatatatgtaaaggttgagagcctggctaccagaaatctaggtaaatatttcttccttccagataaatgtgtagtttttgctttggagtataatgttgttcaattttttaaaaatgttacattagtaatgttgaaaacacagtttgaaacatttcctttataaattcatgttttgtttcttgtcagtgtttttgtttttttcttgttttgttgggttcttgtttgttttttgggtttttgttgtttttggttttgttttcttgttctttgttttgttgttgttgtttgttttttgatgctggtgactgaagccagggcctcatacctgctaagcacgggctgtacaactgaggtcaaccccaatcctctcgccagtgagtctgttcagagcttaagggcttcatggtccagggtgattttggagtgagttttttatcagtcactgcagactcaagttccttttcatcagtccattacttcaggtaaacaagcattccactctctgacagaatgttaaattgttatgttcctttatggcaggctgacttgttcagagcacttgtgaaagagagaaagcaactcctgttttctactcttttccaacctcacagtcgtttttaagggtctcttgcctgaatcactgactacagagtcttaacaatgtctttaattaaactcaccaagctagaagtgtgtattgcagagcagggtccgacccacaaattctaaccaaggaaaccacatgggaaatctctcattcatggttgtggtggtggtgggtggtggatagtggggtggtgggtgctgttggtggtgagtgttggagggtaccagtggtaacaggtagtctacttgtgatgtcctcccctcaaggaagagaacaggcaaaacaaactgaccatacctataaatggcttaggggaaaagttagattggaaaagagctgaggtttctcctttcccctaatggtctgtattgttccagtttttgagggagaatccaggagaatcagaataagaactggaaaggctcaagaaccacaagaagcccaggagactcacaccctaaatgtaggtgtcttggattgccctgtggtcctgtcacagagaaggtgccctttacattacaggcaaaatgagtggtagtttctagaatcttagaggttctccatagggcacactgtgcagggctgtgtccaggcaagtcagactgtataactaaactgggtaaattcttctactggtctttgtagtaccaggatgaaatccaagcctgtagcacacaaggcgaggttctcggtggttatctcctctctaccctgagtgataaattatccttcggcatcttctgattatgacaacaggtattcacaccccagtgcatgtgtgggtcctgtggctcatttgcctaatacagatgagtatttctccactcttctttcccaactccctccctgaacactctctttccccctctctctctcttctcccctcccctccgctcccctcccctcccctcccctcccctcccctcccctcccctcccctcctctctcctcccctcccctcctctctctctctctcacaaatcatatcagaattactgtttataataacttgaaatcctctttattacttacagaacttaattacataatcttcttatagtaacacaaggccaaagtctttgtgaagattttgttaactgaactatgattttttaaaagattttactatatttatttatttatttatttagtgtgtgtgtgtgtgtgtgtgtgtgtgtgtgtgtaggtcaggaaaaacttacaaggctgggtttttcctttgactatgtaggttctgaggtttggcagcacacaccttttcttgttgagccatctctacagccctgaactaagattttagtgaatcactcttgagagcttgagaacatacccagtgccaccagcatctagggcgtttagtagttttatgcctcctggcatgagctgtcacactgtgggcgtcctaatgacataagtgttaacgtacaaagaaatgcctcagtgcctacggagacacatgaaaccatgtatctgtcggtccccacatgttcttcaaacacaattctgcccagagagaaaaatggtaaagactgtatttgaggttgtggaagagacagtgggcagttgcttgcctttatttaaggcaccggttctcaacgaattaagagccattcagggttttaggactgaaactgtttatgttgtgtgacagattcttaactgttggtaaagtgtattacgtacttcataccctaagttgccccatctgtgagaacggcagtgtgacagttccatggtccagaagagggatatgggttcagagaggttaagcaagtcgcccaccattttctaactgtcagccatcaagtctgatcagttcccagtttcccgtttagtggcaatactgtggaagacagttacagtaagtggagcccctcccccaggttacccacagtcattatgcttccttcagtaatctccccaggttttagactacacaataggtaccttgggtagtcagggcggtagacgtgcctaggatgtcgtgactatgtaggacacatgatgcacatgatatgaaaaggcagggcggtaatggtgtaagaagcttccatctggtagacagttatgaatgaaaggcggatacgcttaaggagttcggcagaacaaaattcccacggttgagatcagagacaggcttcaacatcttagggatgggtgtggcggtttatgctgcagtgccagtacttagggatgggaggcaggagaattgcggcaagttcaaggctagttgggccagcatagcaaaacctgctctcaaaacaaagaacacacaaatgaaatgcagacaaacaagttagcagttctaaaataaataaattaattaaataaataaagcaaaccaccatgcttttcaaactgtggagaacttttagcacgaagggcaaagttcaactcttgcctcagtttgcaaaccgacctctagcacggacttttagggagaggagcagagaagaaggagaagtgagagatgaaacctttctgcaggaaggtcagcgccgccgcagacttggcactcggactctcgagcagctgaagcctgtcgtcttaatttcatttagctggatgctctgctcgcaagccccctctctccgtttcctgaggaagtggatcccatccccatttccctgccatctggtgagagaggctctttgctccccaaacaaccccatgtttacatttcatcctccgtcctcttttgaatcctcagcaaagcagccgctttgaaaaggagcccaaaggattatcctgagatggcttgccctctttcctgttcctaagagaacctttctttcttttcccagcatgacttagtgtggggacttgaggtcttgaagtacagctttctgactacttgtctgattgctaaacttcgaaaagtggtaatcttcccgaaggcttgatggaaggttgcatttcagaacatcagattagtttaggacattagtgcacagccttggcgaatgtttaataatgccagtgatcgtacatagctttaaccccacctctgtggcagcagagactggtggatctctgtgagttccagactgaccacagatacacaatgagaccctgagttacaaaatgagacctgtttccccaaacacacaagacaatgctcctgtctgcaaggataacagagtattattaatagtgtcagggactggtgcttgcccatgggatgggtgtcaagttgagctggtcattggttgtaatagtaacagttaccagatgcactgatacattataaaaagtaatatctatttctctttatgttgggcacatgtgactttagaatctcattatacaaaatactaggtataattgcccagatctcatggtgaaaaaaattgaagaggaaagcttaaaaagtgagcttgtgtcacttactcagccttgatagcatgaaaatgcaataagggagcctttttttcttctccctttttttcttttctttttcttcttggtggcagaatggatgagctatcagcatgagttatttggcctgccactttctgtttcttgtaaggagtcacacgaggggatgcgtcagcactctgccacgtgaccttgaaggaagagtagctagttttgttctttgagtcatagtgaaaactggacaggcttagagaactgccattctatgagaactttttgtcttctggagggatggcaggtaggttagagacattcaaaactttgggaagggatgtgattagcatttaaaagtttaacctatatgtcatcccttccaaacgtgtctatccctgggtgaaatcttatttccggtctatggttcctgtgtggagtcatcatgaataatctttttatgaagcactactttaggtatttggatcgattgcagctcatttgcattatagggagaaagttcttgttgcatggaattgtagactccttagagacttgcattgcaagacactgtagtggctttatttagcatcactgtgccgaaacagcacaagaaagttctttactaggttacctttgcctccttcagaaggggaacgcaggatcttacccccagaacttgatcactatgttttcgcaccatctactaggagactagggttccaatgactacttattcatacaaacttacttagcagttttgacactgtcctgaaagccagagctacaatagtaagcaaaacacttaaaatttctcttgtctccacggagcctgctgtcccctcttggttttatgtactgattttccgtttgcctggaccaaggtagaataggcagagttggaaacttcagatgcctgtttgtagtaatctctcactggccagtttccaccttccaaagttatagagccttcctaaatagtgcccaccatctggggacaagtattcaaaagtaattaaatcaatacaaatttgaacctgtgttatatgcatcatagttaatcatattaaagaaccaagcattggaagttttccctgagaaagtagttttgataaatgagaaaaatttgctcctcacagcaagcagaagggacctgaggaataagtagattttatatgatctataataaattaaataaatccaggaggaggattccttgctacctgccccagtgttctgggtttccaaatgagagacattaagtatatgtattttgatatgcctttatcagctcaaaggctgggccacttcctaaccttcacatggctaatccacctccctctgataactccaagttaatatttattaaaactcgcctacccccctccccatcatccccaggtcctacatggtggctatgtcctctgtttcacatcttttcaagtgcgggatctccacttctcctggcatggtgaatctctttcttctttcctcttgactccaaaccctggaaaatcctaaagtcccacgtctgtctctgtctgtcctgcccagccattggctggcgacatctttttttgctaatcagaaacaactgggaaaaggttccttaatgtcttatgtacagatgtatggactcccatataaacagttttggggtctcaaagtaacataaggatacagtcatatatacatgcatgcatgtgtgtgtgtgtgcccatattatagtagagagagaaagctttgcaaggagtagaaattcaatacaatgatacaattaaataagatttaacaatagaagccttggttgtgagttcaaattttacagtgagtgtgatgggaagatattgtgacatttcaagcaggcagtagtagtttatgtttccagagtgtattactgtatcaagcacgaaagaaaaaaaatgctgtgtataatatcctcatgggcatccttcagtaagggtgatggagcttggtgggaactgtagtggtataagaaaggaaagagcaatggctgctctgaggttgtgtttgcttgtggtacttggaaatatgacagacaaaaatggagaaattaggggatggaaagattcaagatgatacccaggtgtttggcttgaactaccatcctgcaagtttgaaaatgatattactggacctgtgagtttgaaatatatacgtgaaactgataataatagccagaaaagttttgaggcatttctcacatcttgtatcaagtgtcttcttacaccattccaaaaaacttcatctaatcttccactcgtccgttaagtggtttctttccttgtgtctctgctgtagacaaagaaattgaggcatggaacaactaaacaagtttctgacaggcacaggatagttagtggcaggacagaaagaaacattcaggcagtcctgcttctgaaatagatgcttccttctcatctttctcaactttacaccccctactcccatacaagaataaacaaacacttggtcttctcaggctgccttggctttatcaatgaagctgaagttgacttttgaagctgctatttaggttagcattgagctattgtccaaacaaaacagtctccctttcccagcagttagacaagagcctgcctctatcgggattactgattcaaagctaaacccaggagtgatctcacaactgctatttgtgctggcctttaatcttcagggaggcagaacatgccccaaaaaacatgtctttgactttaggttgcagcttgtgggttttcaacctttaagggatttcttattgctaataaaatagtagccagcattaactgtcacatatataactgtccacatatctgtcagtccttgtatgggtcctttacatagaatgccattttcaatcttctcaaatagtcaaagatgttagttgaggaaaggcaagtcccagagaggtcttataatttgtttatggcccaaatgtgtcaaaacccaaatttttatgatgttctacttcaacgatcgttgcttttgtaagcacaagcgaaggaacaaagaaccaaccaaccaaaccaaccaaaccaaccaaaccaaccaaaccaaccaaaccaaagacccaaccaaccaaagaacctgcacgtgagtgtatgaggcgacgctatcccaggtatgtcagtggaattactgttcaactgcctcactaccacaaggactcctccctagcatgcgtcaaataacagaaatgtgttgctgtgcttcaggtagcaaacatatattaaatttctctaaaaatgactatcaaaatttcctatttaaaacatttcaaatggctatcgttttacagttttaactatcaactgcccatggtattttcccaggaaaattttagaacaagcttttggagaataaatgcttaacagcccgtgtcgccttcttctgtcagatctgtgcagataatgtaatatacagtagctgaaacaggaatgggtccactcaagtgcaatgggtgatctctgaaatcattggaaagacggtgggcttactggaaggatagtcggttgagcttgggcagccttccagcactcagaacccagttaagtccactgcaggcaggaaacctgttaaatccagtgttgaaaggcaattgctgctgcttctgcaaagccttgctgtcctgcttaggctcagccagcagacacatccagcctcccgtggctcttcttcacattcccttcccataagaaatctcacagagcattgtgtgattgactgacaggagtcttgctttcagcttcctgggcgttttgggacaggatatcctagaagaatggtgccatggcatttgcaaagctagttcatgttacagccccccccccccacattctctgcacttgtatcaagttattctaatcgcaagcatctactagagggcttttgaacaggatgaaatgctgtgtatcatcttagacatttgtgtgtattttccttaatcattagactcagtagctgcctaaaatggtgttcaagacttcagagaatgtgtaagaatcacatagtttgggcatatgatctataagcctcgagaaagctggttaccctgtgacagtcaggagtctacattttaagtcagcatcccaaattatttctcttcctctaatcatgagaactggctccctcttttccacattctatgataggggagcacccctgtaattcgtttagttcaccagaaggcatttggtgtgtccagcacacactgagaatttggaaagctagtctctggattgttgcacatcagggttgccaatcgatgtgatgaagaaatgatcaagattgtgaatgtttactgcgttcttgcctccatctctgccatttttaataatttttttttcaagacagtgtttctctgtgtagtcctggctgtcctggaactcattttgtagaccaggctggcctcgaactcagaaatttgcctgtctctgcctcccaagtgctgggattaaaggcgtgagccaccaccgcccggccaaacattgagagtgcattggccgggaatggaacccaggcatccggtgtggcaggcgagaattctaccactgaaccaccaatactacctttattttatcttaatagagagaaaaatccaggaaactgaaaagtttggatttctgagactgcctgacctacttcctgatataaagaggttttgtttgtttgtttgtttgtttttaaatgcttttattagcatcggtgattatatacctaataacgtttggattatgacatattatattttatactaacttgccccctaccccatcacatcccttgctctccccccattgacccccttctactctagcatctcctcccccctccccttggagggtggcggtaactcactgagtttcattaacagggttatttagaaaagtatgggcgagagatttgcttgtccaaccctttgtgtcttatcagtggctacacctctactgaaaacgactcaatccctccccaattaaccattaactgtgtataaattcacagcttttgctttggagtttgttaaaaatggaaatggcccttgagaccccaagccacagtcttaacagctattctgacaatactttacatttaattatgtccccagcgggaagcacaaaggggtcctggaagttctgggcactcacttccagacttagtgggagctcacactcatttcctcttcactgaattgtttgtagttcagaagattttttttaacagattttaaagaatttcaagctctttcttctcacaagctcacacatctcacccagcccagccccacccccacccccccacccccccccaacgtgtaggagagcacagactgctgttcacagtttggttgctggtttgggggcagctacaaacatcagttttggacatctgggtgggtcagtttgaagagcagttcattggtgtgtgattgaacagtgtcaccttaaaagaaccagtgcccttggaggtcatggacatttcaaaaaggtcaggaggtttttatttgctttttttttttttttttttttccttttgaactgtatttccatactctggctgatgttgggcacagttcctcttagttctttaaaagtatgtcccaaagagtgggacatacttttatgacattctgtattcaaagtcttccttccaattctgtcacatacagtcatcataaaattgatgagaattagcccttaactcaactttcaagtggtctgcaaggtagggggtcacccagcccccaagtttggtataactaaagagctgttaatatgaatattttgcgacatgtcctctttcggttgtctttagtgaaataatatatccacaacagcacaaatgcttagcccatctcctaggcattgcaaacaacagcagcaggccttgaccactcaggctcggtgttaagttttgcctcaaggtcagaacgtctgcttaggtggctttgctcagcccccactgagtcatcccctgctcttgggcatttggaaaaggtaattgctgcggttatcacttcggcctccttctttccccctttgaccgaggcagaggtgaactttctacctctccagatgctgcacttccgctttgtccatttatgagcagctgttctagtgcagacccggggcccctccccctcccaagcctgtgacctctcccctgtggtccgatttcagttccatcagctccgccattgtggacaaggtcatccacactctgagctctcagggaaatgccacttctttcccctctgttgggacttatttaattcatcatatcctgcacgtggctccttgttttccgtttgccccaggacacccagatcgggcctctcttctgctcatatatgtataaagatggctcagtgcatgctgtcacttttaaccgattcaaagagcacaacctgaaaaaaaaaaatcaattgtaccttccctttgccctgttcattatctgttagacaagaagaccttccactcagttccatatcctctggagcctggccacatcactccaccataactaacactgccttccatcttgcccacatagggatctagttgctagagctttcctgactggccccttacctctgaacttgttccccatcaccctactcattcccgcggatgcccgatggacctttcaaaaactgaaaccgatcttgatagccttcaagtctttctagggctatcaatccctttagagtaaaatcgagacagctggcaaggctgcctgtgtgttctctgagattactgttcctctccgcgcttcgtcagagaagctccctgttgaagtacgtggcaggtaatgtggatattgacagccggtcaaactgagggaaatgaaagacttgaggagggactggccctgaggttcacatctgtatcatcccccgccaaggctcagataatttcatgagagggactgagaaaagtatgggcgtgtgtgtgcaggaggaatattgtgtcttctggccattgaactacagctgtgatctcctgcacagggttacctgatgctacttcatcttgtgcgggagaagggttcctatggtaccaaaactccctgagggattatggacagtttattgggtgccggggatgggggagggggagatcttatcattttcttctgtgctatagcagctaaatggcccacattccatgacaaccccacctctaccccttcctgcaactggccatagcaaaagacactccgctaaacctccagccccactgacatagtcttgtgtgaacattccttgtcacctcagttctggggacattcttgtcatagcgccttttcacctggccagtctcctctatcttatacctttgaagaaactggctctcccaagagctgtctgagagcctgtgcctctagataaaatgcagatacattgagcatctcactcaattagaagttgattgtggagtcctggtaggggtcctggtatgtgtcctgttccctgatccacccccgcccccccccccccccgcccctgccctgccctgcccctccatcatccagtttatcctaggcctctccactttgttgcttgtgagtagcttgatcttcctctggcaggtcctcagatcttctctgcccttatcttacctccttttcagatgccccaaagctgtttgttgagcaagtgactttgagagaatttctagaagtctgagagcacctctatttgttagcagcagaaacctttccgtttaaacttggggtttctcccttctctctgggcccataatccgattctttttaagctcctgtttcgaatgctttcatgtacttgtgctgtttatttgggcccttgtggtttcagttaggcactgattaaaggttacaggtggagctccttaggacacttgcctgggagctgattcagttaaagggacacgaagccttcccactccacagacctttacctaaaacttaatggttcatggcacttgaatgaaagcagctttattatcttactggcccaggacttttctttgcggcatagtgtatacttggttaaatcctaacagtgatttaccaggggtgggcctaaaggaagttacttaatttctctgtataatattttattggcctccagaacagggcagtatttacttgctaagtgaaagtgttataggaaatactctttgccaattgtttatcccgtgtgaagcccttagtagtcagcatatgagaattactctttaagtagccattatatatgacaagaacttactctcttagtgttttccccccttccacagtagattaatgctttaaagtctttattaaatttatcttccttttatattaagcagttcatttttgggaaatgcagaactgtttgtttgcttgtgacagtatctctttgtctctgtctctctcttctctctctctctctctctctctctgactctctctctctctctctctctctctgactctctctctctctagctttggacacagcctcccaagcaatgggattacagatgttcaccactgttcagtgtcaggttttagtgttgttcttgatacaagagtctatttactacagacttaccattatgcatatgttgaaatccttttctgttttctttctatctttacaagaggatagaaagacaggcgaggctccccacaggaagagagctatcttgttagcatgcttcacccaatggtgacatttagaaaggaaatctgctctttcttttgttactttgaaatgactagacagaaattagagaaagttggagtgtgggaatcagctgtgttcgttatagtatttgatggtaaatttccctgaatcctgttgctggtttacttggaaaaaaagattttttttttctttgtatgaccttaaggccttaccttaagactaattactatacctgtgccttgataatttactttcctggctctgggtggctaagccagttgactatgttccaagacacatttgagctgcaaggaaactgcccacctccgtagcaggctcctgagattagagaggagatgaacggtgtttctggtagcggtgattgttttgttcccggacacttcaaatatccattttgttagttctcccacatacaggaaaggagccgctctcccctcagtttgtgacatttctgagtccatagcagggagcctaataatgtatgctttaaagactcctaatgcacaaaccaaagaggttgtttggttctgttaagtttacagaactgggggcttctggttttctggacagccctggcctgtgtgcatggtgattcttactgcgacgtagcaaatgaccgcagtacagcacaggagacttcatggtcggatccaagtaaatggtttactttaggggaacaaaccctattgctggtttgtggctttttcaccgtgtggcaagctgtgtccacaggggtcggtgattagataaatgttccactagaatactttaaggtgcttctccccagcaatggttttttgggggtagggctaggttccagctgccttcatcctcctgactctttcctacccatgctgactgtaaagcttactctcagcagaggaccgaagttctgtcctcttcaaagaagtgtggattatactattacttccttctctcgggaccgtttctgttactctcagggcatgcagacttttcattatatttctttccatgatgcccatagtttgaaaacaatcctttgcaataaaaggatatattatagtaagttttatggggagtgtgtgggagaaccttttgatccctaactcaataggggaaaaaaaaatgtcaagaactgaactgccgtcagtaagatttgtttagtgtgtctgtgcggtaaaggttatctcagagggagaggttatcacttgctgagtgtggcctagagaggatagttgtgctgctttaaaacaaagtagccaaagaaaataccatccagatgaagagaatgttacaggggggaaaaagcaagatgaatctgcaaactgaagcgatacatttagaacagaagtcaaaaagaagggacattgtgcttcagtgcagtatctcccgtggggtgtgtgcatacgtacgtctgtgtgcacacccgtgcagggaggtgctgatacacaaaccctccttgaaggttttggagctttctgaaagaggaagccaaagaaatgaggataaagattctgtccgtataattggcacgctttgctgaattttctttcttttttttttttccatttttattaggtatttagctcatttacatttccaatgctataccaaaagtcccccatacccacccacccccactcccctacccacccactccccctttttggccctggcgttcccctgtactggggcatataaagtttgcgtgtccaatgggcctctctttccagtgatggccgactaggccatcttttgatacatatgcagctagagtcaagagctccggggtactggttagttcataatgttccacctatagggttgcagatccctttagctccttgggtactttctctagctcctccattgggagccctgtgatccatccattagctgactgtgagcatccacttctgtgtttgctaggccccggcatagtctcacaagagacagctacatctgggtcctttcgataaaatcttgctagtatatgcaatggtgtcagcgtttggatgctgattatggggtggatccctggatatggcagtctctacatggtccttcctttcatctcagctccaaactttgtctttgtaacttcttccatgggtgttttgttcccaattctaaggaggggcatagtgtccacacttcagtcttcattcttcttgagtttcatgtgtttagcaaattgtatcttatatcttgggtatcctaggtttggggctaatatccacttatcattgagtacatattgtgtgagttcctttgtgaatgtgttacctcactcaggatgatgccctccaggtccatccatttgcctaggaatttcttaactgcaactacattcaataaggtcgaaaaccaaaatatggacagtgccatctgacccccaaaacaatgtcaaaatatgtgtgtataatagtcttgactctccttccacggggcagatacttttttatctgaaatttaaaggccatatgctgttcattgatagttcgagctgtaaaggacttcccgagactcgttatgcaagctttttgttctttcttattttatttattttatgagacaagctcccactatgagagctgggccgccttggagcttactgtgtagttaggctggccttgaactaacagcaattttctacctcctaagtactaggattataggtgtgagccagcacatgtgccttagtcaaacattcctaaactctattcatctaaccaatccaaagttcataagccacacaatgaatggttgtacagtttctctagttggaatggttttccatcttattttttatcactagttcatgaaatgggcgaggcttttatttatgtatttaatttacattcccatttcttaggctgataaatgggtacgctaggggataaacttgacttgttggaggtccggtggtaagggccttgtcatgtggttagggacttatggggttttttgaattatgtgtttttctcatggtttctgagaaagaaggggagaaggagtgtgtaagagagttcctttacctctggaaacctttgttcaaacacaatcttatccaggggcatgaatcaataagaccgtacaaaagctgagtttctttgcttaaagtagaggttaggcgttcagaattcttgtagaggcagctcaccctcctcagacagaatagcttgatgtgggcaggttactgtcttgatttgattcattcagaaagcgtttgtcgaggtttgttttgtttttatatttttcactgtggacatcaccacaaattcagaggcttaaagggctgcaaataaattatgactttttttctttatatcatgtctaaaatcaagtcttccttcccaaagactcgagggagcaaagtgtttccttcaatattccagtttctacaagtggcctttgccctgactcttggatcattgtctctgttttcaaagccaggcgtggtaacacatatccttctcgtggcacactgtctctgatcagagacaggaaatagtctccatctttaagggcataggttaaaaaagataattggaccccacaatgcaagatagtgtttcctctgggagtccactctgtcacatacaactacacattcacaggttccagtattagggcagagtcatcttcagggctagtatgctggttccgatgggttcccatgatggacaagacccatgctgtgtttacacaccttcaagaaagccttcagcaggagagtaggagaaatgggtcttcctcaaggaagagcctaccaattagttatccagtatctaatgatcaaccatgaaaatatacatacaagtacaggctaagtgggatgggcttctgtatctagacatacattcatattcatcatatacatattcatgtacctatcatatacatatcatatgcatatacgtcatttatcatattatcatttatcgtatacatcatatatatcatatacatatgcatacacacatacatgtgtaatacacatacatatacaagtatgtatggaacaactaatgaaaaaagaggccatgcattggaaagagagcaaggagaggtatacaggagtgtttggagggaggaaacaaaagaaagaagtgacataattatattaacttaaaaaaatgtgataaattttttagaaagagcaccagtacaccaatgacaaaggaaatttttagaaaaaaaggaagagaaggcctttagcaggtagagaagaaacacattttttcagtaagagcatgatgtgaataatcactgaccatctataggaaagagggtaaggaacaaactgaaggacaaattgaaacacagtccttcctgcaagttcagcagcttggagctttgccgtaatagcgaacgcagttgctttgccagacttccctttgatacaggctgaatatttccactgaggtccatgaaaccagggaagagaattggctctaaagtttcttatagaatcattcatactgaaaaggtcccatgaattctgcattcttaactctgctcttccatcctcctgcccgagttatactaaagaattcgaacttcacaaatgggaggctttttcttagtggtctcaaagtacacacaaaagctacgttacaatgcggatttacttggaattgccttgaaatgaagttcttcaaaaaaaaaagaaaggaaggaaggaaggaaggaaggaaggaaggaaggaaagaaagaaagaaagaaagaaagaaagaaagaaagaaagaaagaaagaaagaaagaaagagagagagagagagagagagagaaagaaagaaagaaagaaagaaagaaaggaaagaaagaaagaaagaaagaaagaaagaaagaaagaaagaaagaaagaaagaaagaaaagaaagaaagaaaggaaggaaggaaggaaggaaagaaagagtgagtcttttctgtgacatttgattaagttagcacagatttgatcttcaccttcaccaagcacacttctgtaaaactagcaaaagcatctttgtagacatttgtacttgactgacagctaaaattgaggctatgcaggtgaaattgttttgcaattgttgtagcaatctgtcttaattgtattttaagaaactatcaaaggacatatattaaaaagcatgatcagctgaagggtgtagactattcagctgcgcatggaatatggaacaaatgtgtccccatatgtttggtattttcaaaattattaaagtatgagagatattctttagcgtccttataattgatctgacagatttcctgtggtcttggggcagtgtgttgtatttaaaaggacagaagttagaatcagacagacctgactttacatacttagcttcactattctgaagtcatatcaatttcttaatcttgaaaattacgatacattaaaattatgttttatttgttattagatatgcaagctacttaatacgtggtaaatgtttgaaacaaagagcttcattccctgtattgctctgctcccagccaaagcctgtatctctccttccatgattttctagttttggtgagctatcatctacacttctattagaagccagctgcagtgttttagatgcccatctcaccttctgtactcacgtatgcggctctaagacagctgttttctctccctggataatccccaatctattactagagggctgatgctcctaacttctttcaaataccctccccccaccacctcggggaaacttatacttccttgtcaattaccactccattttgtttttatttttgtagtctattaagttgttctcacttgaatggaaaagtcttcaaaagagtttcctatttatttagttattagtttattttaagatttatttattctatgtgagtacattgtggttctcctcgggcacgccagaggagagcatcagatcctattacagatggttgtgagccaccatgtggttgctgggaattgaactcaggacctctgaaagaagagccagggctcttaaccgctgagccatctctccagctcaagtttcatattctttttggttactttttccccttgtgttcttgagcccacttcagacaattctttctaggcttcctcagtaaaaactctcggttagtgatagtcagtggtttccatgttgcttaacccagtggttgatactcagctcttgacatcatctggccaacccctttcttcttttgtttcataggattttgtttctttttgagacaaggtgtcactgtgtaaatctatgacaactttgtggtcctcctgcctcagactctcagtgctgggatttgtagtcatgtaataccacactctgtccttaattgttggttttctctctctttctgtgtgtgtgtgtgtgtgtgtgtgtgtgtgtgtgtgtgtgtgtgtgtgtgttttcctactcctttggtgtctatctgtctagcccctgcatgaactcttatctttcgtgggacctgaactttgacactgtaggatttcagtctttgttatttttttctatttagaatccctgggtggcttaattcattctttttgtgtagaattccatttctttatcaaacgtggtcatatttatatttccagtcccaatcaatctccta

SEQ ID NO: 38 - protein, 273 aa, Mus musculus
MKKTQTWIITCIYLQLLLFNPLVKTKEICGNPVTDNVKDITKLVANLPNDYMITLNYVAGMDVLPSHCWLRDMVIQLSLSLTTLLDKFSNISEGLSNYSIIDKLGKIVDDLVLCMEENAPKNIKESPKRPETRSFTPEEFFSIFNRSIDAFKDFMVASDTSDCVLSSTLGPEKDSRVSVTKPFMLPPVAASSLRNDSSSSNRKAAKAPEDSGLQWTAMALPALISLVIGFAFGALYWKKKQSSLTRAVENIQINEEDNEISMLQQKEREFQEV

SEQ ID NO: 39 - DNA, 32286 bp, Sus scrofa
aaagagggagctcccggacttagcgagcgtgctaggtatttggtccgtcccagggcggtgccaggtgagccgagacgaagccgaggggcccagctgcgactctccgagccaggcgcgcagtgcacgcggcagctgcagggtgttcggcttctcgctccgcaccctcgtgccctcctagccttcgggccgtgcgcgcaccggcccctaaacgaggggaaacgcttggattaatctatccaacttctacggtatttgcagtgctccggcagccctgccggtctcccccccgcacaccagcagagtctcgcttccccggggctccggaagggaaggaggcgtgtccggagtaggcgggagggagccctataaagtgctggcggcgcgccggcccggggcttcactctccgcctcgcgccgggacctggagcgccgcgcgaagctgaggccttggagagggcgtttgcgctcgggctacccaatgcgtggactatctgcagccgctgctcatgcaatatgctggagctccagatcagctaaacggagttgccacaccgctgcctgggctggatcacagcgctgcctttccttatgaagaagacacaagtgagtacggcgcacccaggagctcgccggcacgccaagaaaatcgcgcccacaggcccgcgcctcccggccgcgactgctggggcgcgcggggctgtgctggctggacaagcccggagggcacccgggaggcgggcgtggcgtgctagtgccagctccccggcccgggtgagccggggagaggagtgagagagaagcgtgggagctggtgtcaagtttggtgccgcagcccctaagttgggagctgtcagtggggaactgcagctcctgtaagacgggaggatctgctctttggccggggagtttaaattattacggaaaggcatgcctttgcacgggagacattttccagtgggttccggggagattacacaacagctcccgcgtgccacgctcggtggctcgagcacccagattttcgtgcagccctcgagtgggtgcagggctcgtgcggacgcgggagcagcctccagaaggtagccaacccggagtttcttagcagccacgctcgagtgggcagagaacctgcctggccagctcgggaaaacttggctcccgcggcgtgtgccaggtttgcggctcttggtgagcttccccggagagctccaaacggggtgatacttctacattgcactcaccttctttcattacagtagagaaaaagttgtgtgtgttaactccgatggtagttattgaggtaattgccagtgctgcacaattgtgcattatagagaaggattagtggctaaagcgccgtccaggggtacaattagattttttttccccttgaggtagataactggcttgtcctttggaaagggccgccacggttattttcaaacacagttcttttctccacggcgggctgtacctcttctcacttctccccttaggaatttttccttgtttctgcctcgggttgggtaaggctgccctttcaccccccagaggttctgtcggagattgcaattcctgaaatgtgtcggaagggtggaggtggtggggaaaagggttgtataaatcctcagttgagaatgaaggcatccatgtgcggaaatgctttatttaatggcacacgacgtgtgccattttaagtatatgtctaagcccgggaagagtacacattcagaagggagtagaaagactcgagcccattgcacccgtgtggaaaagagcagcggggagggactcacctagcagaaaggtttgtgtggtctctaggaccgctgcttgggaccgagagaggagcagaacgcaggttcctctcccgcaggtcagtttatgggcaaagcattggacgccacacctgagatgaccacagggggctgttgaaattcgaatgtgaaagactggcgacagaggagaagttttaatgtaattacttgattcgtacgtgctttctgctttgtagactaataagcatgggcggggacccaattctttgttatagtagcatctgctcacttgaagggtggtgagatctgggtggagaaacccgctaccttctagttcagggaaagagcctcaagcttcctatttaaacaagatcactggagacagatcaggttaatgaccaacactccaaaggggggcgatgtggtatcaagtcactttgagagtccgtaggattgatgatccttgcacccttgctttgcaaaacaaatgtgagctctgtaatcgccttcctcacttggattaaatggctgtgtaaatcggattacaggcaataattccattgaaaacgagaaagaggtcgaactaaaccgaagcttcttggtgttagtgagtcagtgctgctgaccagggacattggagacagctaagcattttagaaatgtgacctgctcagaccgaggaaaagtgcaagccctttggtggaacttgcctatgttgaagggcttgaggcaaaggagggcagtgcccttggtgaaagaaggcattcattgcctgggatctaatgaccttcaaggtttgctttaaggataggtctagcaattccgcattcttgcactgcaaaacgggggccctggaaatagcatgaaatggatgagataaacagcagaaatggaacgggcgctaaatcctcattcgtgttgttaaaatttctgatcttaaaagttacattaaaaaattgcctatgcaactctgtatggatggagagcagcgtaagcagatctgacattaagacataagatcaattgttctactgaatctaatgatatccttgccagggaggaatacttattaatattcaatagttcgaatagtcattgacaaaaatggcatcaattccagagcaaatggtggtgtgctctgccattacccaggatataaaatgagaatttaataataacaataacaacaacaacaacagtaataataatatactttaacttgaattacgcagctctctaagaatcacagggatatcagacattctggcttttcagtcaagctgaatatggaaagtctgtcaacaaacacttggggtttgataaatgattctttcatttattgagcacgtgtgatggactgcagcatgtgggaaataattacctgggcagtagttaggagcagcaatttttaacaacgcatttaatcgcaagtctacagaagtgaaagcgttttgcatttttcagatttctgaatgtatttcattcatatggtgtggttttatggtttgaagggaattgtgtctctggcttggaaagaacatctctttccgtatctttttttcaatgtaatactttaataacctggcatctgtaataacaattaggcatcttaatttgcaaatccaatttaaaaagtgctattactttaatgggcctggtgccatctttattgatactgtgcttatattttaggtttgagatggttttgtgagttttcctgattgctgtcagttttggaaatgctaagataggaaaaattcatctggcaaacagtgtagaaaaggccattttaggcacactttagttctcagagaagaagcaaatagaatattagcttttgttattttgaagaaaatagccctctctcgtctgtatgaagtttgtcatctgggtgatgaggcaagtttatagaaaagagcatttttaaatcttgtccttaaaatcactcaatttgggatgtatgctttgaataatcctaatttatgtagcttttaattgatacattctgccaagacttgagaaactcaagtgctaagtcgattacatttaacgtaaaacatggaaaataaccatatggaaatctgaaggcctgagccaaatcagttagaattgccaaatttaatttataacttaactgctgatttggagatagcaaattatgagtcacatttgttctttaataacaggtgattgaaatctttccatcaccatcgataatagtaaaaaataaataaattaaaaaaaaaatccctgcccacctagctagtctgaatactgggggtttcctgcgtagtccgttgaaccccattgcatgtgcccttacctatcggtatttagagaacacctgagacagaggggagcgatcttaggctccagcttttgaagactttgattctcattttctgttttaccggtggtgagacaaatgacattaggtgaatgattgaactccttgggatttctgttttatagtttgtacagtgattacaagagttagaaagatttctctcacatggtggttgtaaggatgaaatgagatcttatgcatgcctcccagcaccgtggtttactgcggttgcagtctgaatttatcatgtctgaggagcaaattgccttcccctaacttaaaaggcagaggaaaaccagttactgcaagtaaaatgagcccatttcataagtctggatctgtggattccgtctcataggctgatatttctattcatcaaaccagggaaaagaaagattatccgtggcgtgggaggtgtcaatgttttttaagtttttctaataaaagtgaaaatgagagttaatactgaaaatagaaaatgggacagtaaatctctggtttactgtcacatttccacactcttgctttctcagttcccctgtctgactctgagacactattattttatttcattttaggcagaaaaactaaaaaaaaaaaccctgtccatggtgttcttgaacttgctttcctgagtgaggacaaccattcatgtcttcaggatgtctttactgttttgaccaggcaacatgcagtgactttttttttcctccttaagtaagttagggaggttttttttttttttttttccctcccttttttcgattacctaaatgttctcttttgtaaatgagggcaaggcttttgaatatacacctctcagagcagtctcttatcttcatttccagtacatgaatcatgagtaaaccacaggatctcttttcagtgttcatcacctgtgtggtcagaacaatttagaagacaaatggagaaacaccgggatgcttttataatataggctgtttgcaggcgtacgttgtttaggctttgtctcatagaaaccatccactgcagccttgcggatttttacagatgcagtgagaagtttttgccatttcacttcattaaggtcatggtaaaacctgttcatggcttggatctggtgtggctgtggctgtggcacaggccagcagctacagctctgcttaggcgttggaaagggttgtcactatcccatctctacctgtttcctctgtcctgaaaactggaagtgacgcgggtgattcttcttagaccttacgctcttggtctaaaatcacaatgtgtgtcatctaaaggaagactgtcctttctgtaactctctttgtcttttgtctgtattttactcttcttccaggctgtgacattgacttggttatcaggggatggtgttcttttattagcacagatgctatgttgtatggcttggggagggcttttgaatctctctggacctcacttgcctccattataaaatgagaaagtagggctaggtgagtgtcctccagttctaaaactccccatttctaaggctctgatacaattgatgcttggactagatggcatttgagcttcctgtagttcggcgatttgtgtagtcactgcttgggtgtgaatagaaatgataaccagggagttcccactgtggtgcagcagaaacgaatccatgaggttgcgggtttgatccctggcctcgctcagtgggtgaaggatccggcgttgccgtgagctgtggtgtaggtggcagacatggcttggatctggtgtggcggcggctgtggcacaggccagcggctacagctctgattagacccctagcctgggaacctccatatgcctcggatgcagccctaaaaagcaaaaaaaaaaaattgtttcatgataggttttatgatcatgaaccagccgatggggagaagtgaaggcgatttagactgctctgctttctcctttccactgagctttagtattctctatgacaggagtggtatttacactggctagtttggcaacatccacaggagaagaggatctttactccttgcaatcttaaattctctatgtgaagaaggtaagtcgggcagccagaggaagtcatcttacgtaattagggaatgccgccctccccatacttatttctgcccctgcagtttccagcatctgtgtgcatcaagtagaaatggggagaatctgcctgtgcagtagaaggagctttggtggagggaagcagaggtccaggtcctgcccttggctctggctccagagcctgtccttgggtctcagcagtcttgggcaagtctcagacaagtcttgggcaagtaagtcacggagccctagtagtatcatgccctagccttattcctgaaaagacagtgaagaggaggagtctgcacctggagacccagaggctgaaaaggagagagcgtcccttctgcctccagggaagacggttcctgcagatggtgcatggctgagtctgagactgtccttgccttgggtttttgcaggtccagtgtggtcgctgtaacacctcttccctactccttttccttagcctctctctcagatgggcagagctgagaccaggagctaagctagtagccagcagcaggttttccttagcagtcagcagccacttttcttattgttgacatgtgaatattccatgatcagctagatccctcctctagccaaggggccatggattctgcagaaaatagagctgtgccagtgatgaaaacactttcctgctgtaagtaccagcaaaatctagggagcgtcctactaaaaccatgttcagaattgaggcaatgacccagacactttaaaaaagcagcagcgactatctttagttatctggatgcaggaattcagcacttgactttgccagtgtagctgttgccttggggcttggagtgctgctcatgagaatgtagttttgcaaggggctagttagggtgccttttctgtgttcctggcacacagacagtggctcaaaaatctggcagttgccttgcaaagaatgcctttgctctctagggtgactgcgcaagagcgtgcacaggacgaaagcaagagcaaagcagtcgtcactgctcacttggaaaatcaagcctctgcttccttcacctttgcagaaagggcatccccactgtataaagtttgtacccccgaatgcataatgtgccccgctggagaccagggagggaagagcacagcctggaggggccattgtttgctgtgtatccacacacacacatgctctgttgccctttcaggagcagaagctcatcttccgaacaaaagccctgtggatgcttagaacttttgcctcttttccaccttgacaggacatctccaaagccaaggacctttccattttcagtgccttgactcaactccaggactgaatcacttctcataattggcctatttcttctaaatgccagtgtttgggtggtagtaccccagcttggctctaagaattgcagtgcaatagtggctgtctattgtgaaggacccctttgtgctgagctttccactctttacttgggggtccctttctcagcaccttcctagataattgccctgtgaaaacagataccttgatttccaagaagagtgtggaagagaacgtaggttgtgttataaaggccttgctctcccctcctgggatgtgttgcccatatggatgggtgttaaaatttacattcacggcagaacttgagatggcgggagggagggagggtagaaatagttcatgtgaaatgttttctgatgtgatctgggaaactgaaggattacaaaacaaacctcagcagttacacatcattatttatgcttctgcgtaaaccttcgatttaacacctctgaaatagtcaccgtgttaggggtttccattcgtgatgaccagctgaagtctctgccttcctttggatctctggtgattgtaaaagctgcgatcttaagccagccccacccggagagctctgatgtgttctgttgacgcacaggtcactctaccctgtgttcaaaagacaaattatcaccatgcaggatctgggcgggggccttctgcctccaggtggtccaaagtgagtgctaaagtgcagggatctaatgaaggagttagaaaacattcaggaagaatcaaaaggaggtttcgagtacaatgtcgtcagtgctggatgaagtcaattccatgtagaaaagcacagaactgtaaaacaggatttagataagcctcccattgtttttgcaaaaaaatggtaacttttcttttttcaattcttaacccctgcccacaaaagtatttttaaaactttagaaaaaaaaaaaaaaaaaaggagttcccattgtggctcagtggttcacgagcccactagtatccatgaggatgtgggtttgacccctggcctcacgcagtgggttaagaatccagcattggcatgagctgtgctgcaggtcacacgtggagctcggatcccacatggctgtggctgtggcataggctggtggctacagctctgattggacccctagcctgggaactttcatatgccatgggtgcagccccaaaaagcaaacaaaacaaaaaccccaaaacttgggtacatgttcgttcataatgtaccctggttataatagtactctgtctaaacaatactagaaaatagtggagtatttttttccctccatctgaaacttggatcttttttattcttaaacaactccatagacttttcaacccaaaaccaatctgaccatttattgtttgtatttctgtataaatgtcacacagaaatgattcagcttgaaggaatgatacttactccagtatgtgtcaagcatttgacatttaaatgtgtagccattttaagtagctttcatgattgttttggttaaatcaaatcaccctgataataagatcatgccacaatggcacttactagaaaacaattccaagatgaattaattcaaagaacttttcttctgagaggtaagtgctgtttttttttttctttctcaagtcccatttcacagatggggaaactaagataaggtctaatccttgccaactccaggtgtgtatggtaatgattaatacccatttagctggcacaacccagtccatcagcgcaccttattctgtgcctcaaagatacacgttctgctataggaacattgaagcaaaaatgcagttcagatattaaacacagctgcctataatagaatttggcaacagaaattttgtgatgccagttgcttagcagaatggctcatgttatatgttcaataaacacagattgaatgttgtggaatgaataaatgcctgatttcaggttgctaagtgtcaataaccttttttagaagtctttctttttctttttcttttttttttaacaaaaggtaaattttaaatactgccctgcctctgttatacacagaaacatgtttgattggagaggctactttgttcaccatttatagcattagttttcagggtaataactaaaatgcactgttatttactaagcaaaactggcaggcatgtgagcaaacagaaaacactgaactgagtctgatgtagtagcagttctgctgctttctagtatgctctttagtgtttctctctgaacttgactttcccagtctctaaagtgggtgtacaaatagctacctgttggtggtatggatgtgatgattgagactggggatctacacagtaacttgctcttagtaaataatcagttccttctctgcaagaagagcaaatcagggaacctttcagtaaatccacatccggtcaaacataaattcattgctggcagttcctggctttggccatagggcttgtatgaataaatgaattaaaataaaagagatgaattctttaactgccttatgtacacacgatctactttaatgctcataagcacttttagaaagttaaacagaatttccccaaattttagctcctttgtctttctcccctttctacaaaaggtaacagttctacaaaataggtcaaaaaacaagctgcttaagaagggaaaaaataagaaagcaataggactagttaataagttaatatatattgattattcaccatagatggggcactgtgccataccgcacaggcatatgtcaattctagcaaaaaatgtgatgaggtagatattatggttgacatcttttttttttttttattaaataaggtgactaaagttcagagattaagaacacttgcccaagactaaaaggggggggaagcaagtggtagagcttggatttgaacccaagcctgttgaagtctaaagattagaatccactgaatcccatcagtagaatgcgactatattaggtatacgtgtatatacatcacaatctgtaaggcctgagacttttttcctttaatttgcatgtcaagatgatggttcttcatctcatacctgttgagatgaacgcaggcaaagctgagttgcctgggtgagggacagtttgcttgttacttaactctgcaggcccccgcaggagcacaagtccgggagcgcaggcttggtccccagcctctcccacctcagtctccttagccatcaaattcctgttcactgacccattttgagggaagcacttagaaactgtaagaataccattttatttcatggaattaagaactactgccaaaaccttagtgtctttcaaagggtgcttttttggcagaggggaggtttttaaagatttgaaaaatgtgttgcaaaataacttcttgggcaaaaaaatgcttcaggaatgactataatcaatttgttctgactattttcacgttgtttgcaaaggcagtttgaagtggctatgatcatattagaaaactatttagcaataatgtctttatgcttacgtctggttgttaaagccaccagccattaaagtcgtgacctttgtattgtaattctttatcagtccaatggcatgaatattaaaaattcttctacattaatggtaccattttttggaaataaatgactgctggagcattattaaccggcagcagcatgatgtaatttatcactctagtaggaatgaaagtgtttgctagaaggtcctggaatcactgaacacaggtgcaggagacgacagaactgtgggtaaaccaaatggactgcagttagatgggccgctttggtgggctaatcctctgagtctgtctccccatctgccagatagggagcagtggtccatgtctctaaggtggttgtgcagaatacatgaaatgacccacagagagcccttagtccggtgccaggcacctaggaaatactaaataagtattcgctatgatcttgcgcattaaacaagttgtatgcccattgatagtgatgacgcctttcttaagaaagtgactttaattgcaaagtctccattgtcagaatgaaagggaaaattgaagcagtttatccaaccaactcaggcttctaaggcacttttgtcccgaataattgctttctttccctgccttaagagaactctgaaaaggagctaaatgggtagaattataatcacaagatcatttacctagagcaaagggacttctttctgtcttgtgcccaaggtcacagagctcatgggaggtggagctggcttatgaaccaggtggtctggaacctgagtctgaacctctaagctctatgctgtacctggaatggggaggggggatgcggggtggtggtgtgcatccacgagcccttcctgtgcactggggagtggtctcctgcttttccctctctgggaggaggcgtcaccttttgcatcagtagaaatagagccacttgttgagggagaaaggaaagatcatggctttggtgtcaaaagcacctaggttgtacctctggctcttgcctctaccttgcccaggggtcttaggcaatttatttaacttggcttaaccttaacctgaatttcctcttctgtaaaaatagaataacaatactttgcaggtttcctctctgcttcttccacctcccccttcctgtttcctcccttccttacctttttaacctagaagtagttagtcatgtacctgctttgtgatggtcactcacagaattgtatggctataaaaaaaaaaaaaaaaaaaaaaaggacttttcagacttaaccgtattttcctgctaccctatacatgtgttccagtgtttgactcattggcctcatgtagacactcagaggagcatggacttgggagtgagaatgaggctttagtcctcatagcgcttgttactcaccaaggctcatgggcgtgttatttacttttccgctgggccttgatgtcctcatctgtacaatggagtaataaaggtaatagtacatagttggaagaatataaagattcaatgaggtaatgtatggaaataggctgacgtcgaactgatggtcagtaagcggtcgctctaatggtcagggactggattctgccagcgaacatccgcctgtttttccgtttgtgtgatggcagtaataatttacacctgttgtcattgaacagcagcgagcgtatgggtgatgatgggaagtggggtgtgtaaccatgaacggagatgagtgagggtctgcataggggtcaacatctcccttggcaaccaaggatgctgacaacctcaccagttgtacgatacaggaattagcaatagagcagtgctcttcagaccatgccgttccattcggaagcctcggggctgactattattccaatccttgagagatgaaaaattcacactttctaaacccatgaaagcttcgcgtttattaatgtctttcaaagggagcctcacactaaataggacgtattaatggctttggagacacatggatctagagtgagctcttctaattgggtgacgtagtctcttaattcttctaacagtctgattttcctgtttgtaaaatgacatctgtaatagtgcctagctctccaggtggttttggggattaaatgagccaatgcatgagaagggctgttgccaggtacccggaaaacatgggtaaatgttagctttccaagcaaacttaatttatgtatgcaaagtttgtgtgtgtgtgtgtgtgtgtgtgtttcacatgtgttgaatttagtgagactgtatgatcaagagtttgggaatgtttgcattatgaattcaggttttacttactaatgggtgattgcgtttagtgtttgagggcttgattgtccaggttaatcttcaagtaagttttagatcagtcaagacagatgcaagttacttttatcagtccattacttaaggtaaacaagcatttcattctctgacagaacattaaactgttatgttccttttgatggggtgctgacttgttcaaaacactcctgaaagacagaaaacagctcctgttttccgacattgtataacctgaagactgtttctagtggtttcttgattgaatctttgactgtcactccctcagcaattaagttatcaacccagacaagtgtgaagtaactgtgggttcatttccagagtgggatctaacacaacaacttgggccaaaactgtacaatcaaaaggcgaaaatctctttttaagtgttggaaaaggaaagaaaaaaaaactacatccattcttttaaggcccagtgaagaatgggacagaatcattggcatgagttatttttataagctgcttaagaggagagctggatgacaaaggggcttgctaattttgcgtctttccctagcagtgtgtgtcttggcacttgacaggcaaggtaggaaagtcagaacaagaacttggtgaccacccaagagatccacatcctaaatggagcagtgtggtgctgatagggggttcgcctcgccaaggggatctattttattatccaataaaatgaagagtaaatgctataattttaaagattctctctaatgcacccaactgagatgattaacagagatctgatcatgtgactatcctggttaaaatcctccactgactctgtattacctgcaggataaagtccaaaccctcaacacactacacgagattctctgtgatttggttgttgcttttcgccatgggtccctgggtggtagatttcgttcctctaacagtgttgactggagagtgacatgccccacgctgtactttgtctcgaagggcctgacagcctctcttcatcctccagctgatctggctgagatgatttctcctctcagaaacccttcctgaagtctgtttgctctttcttccctcccccaactcccctgtggtgagtgaccttaccctgtgcttctataacaatcaaaaaaaaaaaaattgtatattggaaacaatataatggaattatctccttacgtacctgtctacctgggtaaaattgcctcatgtgggtatcaccagctagtggcacagcacgcaactcttagtaaagatttttggaaccaagctatgagttaatgaatcacatcagatgtatctttgactgaatctttgactcttaacattctaagcatggatctgagtattacatgccttctgagttcagttgacacccaggaaggtgactggaaggtaggagcaacttttgaacgtgactgttacgcactgatacccttcataggaggaaacatataacatacccgcgataccgcctgtcacagacatacattgttcaaacatgattctgtttggagaaagaactgggccacttgaggttgagaccatggattaaaaaaccaatagagtgggccaacgtgcttgccacctctaaggaaataacaaaataggttgaatagcaggtgtcagctgatgcttgttaagtcaagatgatagaggcactaagagccagagagattttagcaggtaatactgttgctgctgctgctgctgaagaaaagctgattctgatgctcatgtgctatgccctgtcctgagctaagtttgttacataattttatctcccctgattctctcccatctatgagggtggttgtctgatcctaccatttacagaacaagaaatgtgggcctaggaagtttgaacaagttgcttagcttcttacaagtagtcagtcttaaacccatccttttgtttggtgttactattgctgccatcttttcctttccctagataggatgtgtttcttgatacatactaatgaataagactattataaggacagtaaacaaattcctcctcccagctcacccatgttcaagaagcttcctttcatattttctctccacagtttgtgttggttaatggttagccagtgcaatagacaaggaaagatgttgtgtaggtttagacactgatgtgtataatctctatcaagaaagtgttgaaagaaatgagatatgagaccgtagtcagtatgagaattttagatcattaaacttacatggtatttatgggcttaatttgcggtgaaggcatttagcaaaaatggtatttcagtactccagatcaaagatgtatttaaatttggaggaagaaagttggagatggatttacaagtgatgttttcaaatttcagctgtgattagaagccaccgtcttaataacctaaggccataatactactgctttacaataaaattccctgaagtaatattgtatagagcctgtgtactttaaaaaaattcacgatgcaaaattttcacaagtgctgaagtttttcaagttatgcaaccttgtagcatggcctattttgcttttttttttttttttgaatcaggtaacctgcttggtttggggcatggaactgaaaggttaactggaacccataaaacttgtcaggtcttaaataatcactgcattacaaagagcagcatctacctcctgtctcaatttacaaacaaaagctccaaaaaggaccatccatgagaaggagatgtaacattcaaaaatcaaaccatgaagtagatgtgcagaatggcgagtgcagacttggcacttgacttgtacagcagctgaagcgtgtcttttaaatttcatttagctggatgcatggccctgtcttcattcccgaggaagtagattccttttgctcctacatagtgaaagaatctatttgctctccaagcagtctccttgtttacatttattcctccgtcctctttggagtgctcagcaaagcagctgctgtgaaagaagcccaaaggctcgcctaccttcttttctgatccacggagactgttcctcccttcccccactccagcattattcagcattaggacttgaaggtttaaaggacattttccatattttttttcttttttaccaaggaagcttaattgatcaccttcccaactcatctttgaagaaggatttcagaacacaaagtagtgtatgtacgtacatttacttttagtttttacattgactcagcaccttttaaaaaaaaaaattgtagaaagaaatgtgatgccacccctcacatgctgatacgtggtgagccttttatttctgccctacatttttctctacggaatgtggggtctcttcctccatagggctgtcacagagagtgctaagcccaactccgtggcatggtggtgaaaaatcagagtaaaaaatcttgccacttagtcatgatgattagcaagaaaatgcaatactaaagcctatttttttggggggaggggtgcagaggaagtgtcattccagcgcactcttgagttgtgtggcatgcaactttctgtttcttgcaaacaagtcctaggaaaagagagcagtgatattatgccatgttactatgaagaaaagggagtcaattttattctttagtcaaagtaggtctggatgacatgaaaaaataatttaggtctgtgagggttttggtgttttgttttttttttttttttgcctgctttggtagggatgacagataagtcaaccagtgctttgagaagagataagattagcatttaaaagcttaacctttgtcatcacttctgaacttgcctgctccctagtgaaatctattccctgcatgtgtttccagtgcagaatcaccatgaataatttttttatgaatggctgctttagaggttttgatggattgcagctcactggggatacagggagaaatttatagatgcatatttgatggaattctaaacaaagcacagaattgtagacctcagaggcgtccacggaatttagtataggaaggtatctgcattccagctccatgtttttgttcttttatttttcctaatatgcccctgttgggtcaataagggaaagtaactacacattgtactcatctagttcctttagaaagggaatctggggattttacaggcaggttagtactttggattattaccacactttggctgcatctgtcaggaaaggcattttcctctggttgttcattaaaaatagtttatttatcatttactacaaacaaagcacagtgggagagttgagagctacattagtaagaaaagcagttaagttgttcctgctcttcatggggcttacagtctgctcttggttttatatctttattttccatgttcatggagctagagaagtatttcaaggtatgaaggaaacagttaagagttcaaactgaaaagaacatagctattgtcacatttggggtagtgaagagaatgttgcaacgttactcactcttggcatcattagggtttaacagtgatagacctaagagtgcgaaggatggcaagagtttatgaccaatgggtgagcaaaactctcctgtttatccttcattcattctaaaaatgttcatcagagacttctctgaacatggcattgctctacccattctggacaaaacagccttatggtgctgaaactcaagtgcaggaggcagataacaagcgaatctgatgagtaatgttgcaattccatttcgtgaatatggaccctatctactaaggactgaatctcacactagcctgactttgtgccctgtttcccccctgagtttattcaaacaggttagagattgctatgactgtggtcagtgctatacgagagaatttttctgcagattttagtgacagttggccatgcacagctgtgaaggagcatgtcctgtgagtgactagcaggtcaaggtactagagataagaattaacagtaacagaatcctcatcctcactcccatttacatgcttgtcagaaggaatagatggtaagagcgaacgaactgaggaggcaagacagtttctcatcatttctgattgagtgcttgagtggaaattgatctgagagtgctgggaaggcttctccttgaaggtgatgcctgagatgagtcctggatcatcagaaagagtttcccctttgagagtccaagaggaagaaagcttataacagttggtgcaaagggcttaaggcaggaacccattccccgtgtttcaggaacagaaaggaggtcggtgtggctggagtatagtgaggacagaggaaagggtaagaatgagcatggaggagttcccattgtggctcagtggtaacaaacctaactagtatccatgaggacgtgggttcgatcctggccttggtcatgggttaaggacccagcattgccatgagctatactgtgagctctgatccaacgtggctgtggtgtagaccggcagccgcagctctgatttgaccccgagcctgggaacatctatatgctgctgctgcagatgaagccctaaaaagccaaaaaaaaaaaaaaaaaaggataagcacggaggtgggcaagtgtacgttaaacagagccttgtagaccagaggcagaagtgtgcattttatcgcacatgtacagcagggcagtcagaggtttttaaccaggtggtgctgtttgtctttccagaagaccacactattgtgagaagcaagtatgaaatcaaaaaaggcaatttatttatttatttttgtcttttgttgttgttgctatttcttgggccactcccgcggcatatggaggttcccaggctaggggtcgaattggagctgtagccactggcctaagccagagccacagcaacgcgggatccgagccgcgtctgcaacctacaccacagctcggcaacgctggatcgttaacccactgagcaagggcagggatcgaacccgcaacctcatggttcctagtcggattcattaaccactgcgccacgacgggaactccaaaaaaggcaatttaaaggctccttacagtcttctaggcaggagtgatggagctcggtgcaggttgcggtggtacaagaccacagggagggaagtgaaaagtttcaagatttcttttgccagggaactaataggatttgacaggccgcagatggtaagagggcgaatggaaagaatcaaggatggtgcccagagctgggactcgaaccaccagacgtcaggtctgaaaatgacattgaatggagatccctgtcaagggtgtgtttgaaaagacaacagtcgtaataacacagtggacagttatgagggtgagctcgttgtcagatacgagataccaagtgtgaatatatgtaattttttcgaatcctcaaggagcttgtgaactaagttctattcttaggcccgtgttacaggtaaggaaactggagcacagaagaataaaataacttcccaaaggccccaaggccagtcggtggcagaatagagattaaaactagagcagcctgcatctaagcacggcctctcagcccccacgctataccgcattctctgtgcgtgagtaaacacactgttttctaaaactgtctgggattattacctaagctaaagctgacttttgaaaccctgctgttcaggttaacattcaccctttgcccaaacaattcagcctcccttttgctccaggtagagatgagcctgcctgctttgggagagctgatcccgaatccaggcccaggggtcagcttcacaatctctttttatccccttgctgtgctgatctttaatttatggcagtgacagaacataaatggggttgtgacatatccactgttagtatagcttttaattttaaggtcaacattaaaaaaaaattagcagtcatgataaaataactgtgggcatgccttgttttattgtacttcccaggtactgcattcccccccatcctagatactgcattccccccattctcccccccccacccacccacaaaccccacaaagatttatggccacgctacctcaagaaagtctgtcggcaccacttttccaacagcatttgctcattctctctgtgttatatatttctgctgtatttcaaattgttcattatttgttatggggatctgtgatcagtgatctttgaaacaactattacaacttgctgaaggctcaggtgatggtcagcattttttagcaataaaatatgttgtaattaagataagtgcattgttttagacatcatgctattgcacacttcagagactatggtaagtgtaaatataactattacatgcactgggaaaccagaatattagtgtgactcacttgctttattgcaatagtcacttcactgtggtggtttagaactgaacccacaatagctccaaggtatgcgggtatagcattaacagtcatgtcgtgatctatttagtaccagttctcttgtgggtacttgatagcattgtcttatttattaatctttgcaaaaatccaaggaaatgttatcaccttgagaaaaacagaggctcagagaggttccatcatttggtcaaggttgcagcatgtacgtttcagaaccgggatttgaacccacagcctgctttgctgatgttcttcttttctaaacatcatctcatctctttcataagcaaagaacctgcagttgacatgtattgttaccagaggaacatgtcctgggcatgtcaaaggcagatgctttgctgggcttcaggtagtagaattgcattaacattttcttggattgccaatcaaaaactgccttcttaaaattttttaaaaagacctctattcacaatttgaattttgaaatactgatggaaaaacatagggtaagtttagactaacctcaatgagaaataaatgcttagtaacttggattttttttctctcctagaattgtttaaggtttagttacagacaacataatccactctagctcttttaaacagaaaagaagatactaaagtgcatttgatagcttataaaccactggaagggctagaagagcagtttaagatttcagaacagtcttagctctcagaacccagtcaagttcaaggccacgtgtaaagcatctacggccaatgctgtatagccgggactgttgctgatggcaggggcttgctgcccctacgaccacccagcaaaacgcacgcccagcattcatctaaccgtcttccccttcaaatcttgcagagttgttcctgactgatgaaactcaagttgtatctgcagctgtagcttgttgcagaggtgtcagagacatggggatgctaattgtgcagccactgaggtacagaacatgctcagagagagcaggactgggaattaagaatcaattcacagtatgctctccacttactacattgagctcttttcagattcttctaaatcaggagtagctaatatgtagctcttgaaccaaatgcaaccttgtataccttttcagacaatttttgtttcctctaatgctacccctgaaccagcagagcctaaaatggcatgtctcagacttgagagtgtacctaagaatcttgttaaaagtactcattcctgagatggaccttcagaaatttggaatccacgtgatgcccagaaatctgtactctaaataaataccctctcctcccaccccagatgattatactttgatctaaaggtaagacagcaactcccctcatttcagatggggcacttccttgaaaggcaaggatatttcaacagtttattcacttcggccagaggcacttggtgtgtccagaatacattgcataatcaggaaagttcttgcagtgacctttgcaaatctggcttgtcatctgatgcgatggagaaaacgatcaagattgtgcatgttctttgagctcatgcctttgacctgctggttttgatgatatttggaagcagtaacagcagagtataaagatttcatttatttgtagtcagaaacccagatgggaagaaaaaagactttgttggagatttcctgagctgcttcctcagattgagtcttcttaaaaattgaaaggacctgtgaggctaaacttgtcagactcccagtgggtgatctgacaagacatctgagcatatttaattacagccacaggggaaaaaacacaagaagttctaggaagttcaggcattcagtccaaattcagtgcctgggctcaaatagcagtgagagcctactgcactcattgtcccatctcatttgtttggagttcaaaaagttgtacagattttaatgatgtgtagaaactataatttacaggtcatcacaatttcaaaagtgagttagatagttggaagaatataaattaggatttaggtttttgtagcagttgtcggaaagtgacaacccttagatggcacatcatgattcaattttaaaagcaactaattggcataatagtaaacaaagccatgacaaaagaatcagtgcccaggaagtgccgaatttggctatatgacgtgctgaatttggatatgtggatttcagagctgttacttttgtgtgtgtgtgtgtgtgtgtgtgtgtgtgtgagagagatattcttattcttgccaatgttgagggcctgccgctcttattttttaactaaacatatcaaaaataatggtaacagatatgtaaggctaggttcaacattgaactagcatccaccagtcttctagacccatttggtttgttacacatcttccttataacattgattagaattagccatcaactagcatctctgtcaattgcagtgggttatactcttgatggggaatctttcgctctgcttttatatagttgctgaagacttacatttatgaatagctaatgacctatatagtaccattctttccaatgaaataatctatactgctggcacaaactcttactttatgatatatgtctctattaaaaataatagtaaaactcgagcccttagaccctaggttctagcctcaagtagaagtcctttgtaggtattttcacataggggcaaagtctctgagcttacctgattctcattaaccccagccgagtcccccatgcacagtccatttaaggaagaagaaggcttcattggtcattttggcccccatccttttcctcttctcatcaaccaggactaaagttaagcttttaggccttccagatgtcacacactctctgttttcgtaagcccttgaaattccctcactctcattgacctccgtggtccatcggccttggcctcactccaaggctggctccattaggtactctgaaacaaccgtcaggttgacatctcttagtgcttgttttatcagtcacactctcccctttttacctttcttttctgttggccgcagtacccccagatcagctgatttgcctcccacatggatggcttctcattctctctcgtcgcctctgcagatggttcttcttcttacatgacagtgttctccaggggttccggtgatcacttccaatctccagcggccacttcgacatagcctggctcaaggcgtagcaccacttctgcctcggtcacccagactggaccctggaagacatgtgtgactccccttataaaccccacctcccttctgtcagtctcccagattcttctttcctgcttccacatccgcatgaccgtgtctgtttctctccactcccactgccttttgctagttaagtccctcctcatgtggcctccagatgactccactgaccttcacactgacctcttgcccccaggcttgttgccagccttcccaccccatctttccttcattctgatggccattaaactttgcaaaaataaatcagatcttgatcctcccctgcctaaaactcttcagcagctccccaatgcatttaagataaaatccaaatcagttagcaaaattgggagggcctctgcttatcttctagcctcgtttgttgttgcttattccttgaaactcattttttcattcatgtcataaacatgaaggtctgtgaagatgcctcgttccctctcttctgtgggcacccactcctttacttctgttaggggtcttcgccccagctcctttgacctggctaccttccacccacctttgaaaaaagatgtcatcttctcccagaagctctttcggagcccctccctcactctccccactccccatccccacagtcaggttcagctgttcttctgggcccttcgcctcttgtaagctctctcaccctgctgtgtttgccaggaactagagcttcctgaggccatgatggtatcttctgtttctttaccttctgtacttatcacgtggtccctatgcgtcttttgaataagtaagtaattcttagaaatataaaagcactcaattttgttttttatcaagaaggaataacttatcacttcatttttgagctctcctctccctctagctatggatttttttttttttttatcaagtataacctgatgtacctgcactacttgtttacccagcctagtcataatttgacattgtcgtttcaattagaaactgacgtggttagagagaccttatgccttccacagcctaggcattttaaatacaatttaattgtttattagatagaaatgaagtcagtttttattatcggactggcccagcgtttttctttctagagtagtgtaggtattggtttaaagtctgttcacgctgggatttactgcagagtggccacagaccagtcagttaatctcattgcattgtgtttttctccctgtaaaatggggtaataatgacctccctgggtgatggagggtcctgtgacgtagtatctgcacgctgtcctgtgtatgatccttagtaggtgtccataagtgtgagtcattgctccccttaaaaggcatttactcgtagagtaaggactaactctcatggggtgactccccctccccccttttccccatagactgaataccttgaccttcttgcattctccttgtacgttaaagccattgtccgcctttgtaatattaagcacctcccttttagaatgttcagattttgttaccagcgcacacgtgcccatattggaaaatattttacttcccaaaaagatctgcaaggagaaattagaggattttagtggcacctcttggactttgacctgatgtgagtttcactctcctggcctgttagcatctactttcctgaaccagcagaaaagacaacccatctgctgtttcctttgcccctttgcaattactggacagtcactagagaagaatctgaatcagtgtaggatgatgaggtgttttctttatactgtgaaatggtagaatctttttgaaccataaaaaatccaaaggaagtctagaatccaaaaaaaaatctagaatggagtggttattcactgactgaaaatctgtggttaatttaggtcaggagtatcacttgtggaggatcgggttcatatgtcctcagaaaacctgaactcaggactagttactctacctgtatattggtaacctgctttcctggctctgggtagctgagccagttggctctcttccaaagcgcatttgggctacaagggaactgcctgctttgctagctggcatgtgagattagggagaagatgaatgttgtttttggcagcagctgctgttttgttcggggccgtcctaataccatttggtagttctgtgcataaagaaaacgagtttcacagacaccccacttacctttttggctttgagaagtctgtaaggtggacgctggccaggcgtcttttaaaatcgattctcacatgcatagaaaagtattttgttcttttaattttttttttttcaagtttagaagattggaatcttctggtttctccaacagcgtgtgtccccctgatgttcttgggctgcgtgcatgttaatttctactaaaggaaaggagtctgcaacctgacttctgtgtcataacacatgttcagatcaagtaaataatatgctttggggggctttggagctcctttttctggcatgtggctttttattgtaaggaaggctgttatactaaggaacaatggatgaatgggtgactattcctctggggtctctggagactggttctcaacagcaatgagatttaggtaagaccttagccttgagtgtctccagtctcattttcctgtaaattttcttttttaaagttccctttgaatactctctgcccctgttaaaacctcctcccagcaagagatctactctatctgtcatacacaattgtaaatttcagtcgctcttacttccttctaccaggacggtttctactggatgttttggctctacgaggacttacagatttctgattttttttttttccagcatggaaataaggtgaaggcaactcttagaaatgaaagggttattggaatcctgtgtgtcatagggagtatgtgggggacacttttgacgcatgcctctaaataaaaaaatctaggactgctgacaatgaaattagtttcatgtgtctgtgcaatgaaaggttatcataaaaggagaggttatcacacaacgagcgtgacctagagagaaaagttgtacgatgctaaaacaaagtagccaaagaaaaaatgtcatatgcagaaacagagagtgttacagaaaaagcagtgagatgattactcaaatggaaaagatacattttagagcagaagtcacaaacccagggacattgtgcctcagctttctatctccaatagggtgtgggtatgtgcacacacacccacacattcaggcacccgcatacccttgttggagtttccagaagttacagaacgaggaagagagagatgaagataaatattttgtctctgtattggcgcacctctcttaattggaagtcagttgtcttctcactgaagctactctcaacagagttaagaatgaagaaataaatggaaaaaggccagagcatcaaaatagccatgtactgaaagtctgactctttgttcatgcaagattgactctataaagtcctttcccagactgttttattcattgaagcgctggtttccttggtttcctagacaatcgaaacctataagccgcacaacaaataattgcagagcacctgtagtttgaaaagttttcatttgattctcaccaccacttcatgaatgggtgaggcaaaaacaattctcattttagagatgggtaaacagacgctcgaaggattcactggcttttttgaggttacaacatgaggggctcagaggtttcctggatccatcttctgaaccctgccatcgcactaccagttttcaaaagcatgagctcttttttctttttttctttttcttttcttgcccttggcaacctttgttctgacaacatcttatccagaagcatgaacaaatagaaaaaaagctgagctgctctgttaaagccggctgtgggggtgcagaatgctggcaggcagtatattttccttaccaggagcagcttgagcattacgtgctacaccattcattcatcaaaaaaaaaaaaaaaaaaaagagatttattgagctctgatttatttttcaattgctgctgaaacaaattaccaccaacttagggacctaaaacaatacagatgggttctgttcaggttagaaatgcagaagtccaaaatggagcttgctgaactaaaaaaagcaaggtgttggtgagaccgcgtgtcattatgaagtctctgagggagactcttgtctgcttgccctccttcagcttctaaaagccactaacatgccttgactcctggcctcttcgctccatctttaatgccagcaagggtgagtcaaagtctttaagtcacttctttctgacccatcttccatcattgcatctctctgaccagagttggcaaaggttctccatttctctgagcttagactgagctcagagaatctcggatcatgtctccattgcaaggtcctagactcactcacatctgcagagtccattttgccagataagggcagtattttcacaaattccaagaattaggatgtggccatatttttgctattaatcggccggccataagcagccccccagggccacctgctgtgtttgccattgagactacacaaggctagggatgggcatgtgaacagtgaaagtgtgttgcagataatgatctaatgatatgggagaaagaggtcaatgaagaaagcgcctaaagtaaaattaaaaaaaaaaaaagagtccttgtgagaagtacagtaatttggagctcttcctaggagagcagtgacaagtacacaaccaaaatgccttgcccttcagtttaactgaggtgtgactgacaggaatcgtataaggtggacaatggggtgttttgcaatgtggacacattgtgaaatgatgaacataatcaaattatccacattacccttctgcgtgtgtggcgagaacacttgctatctgctctcttcggaaagttcaagtcaacaatacaggataatttgctgtaggcaccatgctgtacattagggctttagtacgtgtcttataactgaaaagcctgtacactttaatcagtagctccccattttcctcccccaccttcccacctccggtaaccatctttctattctttgtttccatgagtaatactttttttttttttgattgcacatttaagtgagatcatagggtatttgtctttctgtgtctggcttctttcactgcgtcttccctttatttgatgaatctgagtcatccaagaaaagcaaagtttaatgtttctcgccactgtttaggaaatcagggaagtgtgtgtactatacattagaaaaatttctgtatagaataatatggaaaaaaatacttttccatataaagtaagccccacatttcagccctctcccgagaatactaatagggaggtataactaccgccatgcagacttagcacatttctcccttgactgctcctccataactcagttttagttatgcctgagtgaatgactcaatttcatgaaaggtggatactccttaccaatagcgaagtgcttgacccttgaacaacatgagtttgaaccttgaaggtccacttacatgtggatatttttcaggggtaaataccgcagtactgcatggtcccgggctggtcgaatccccagatgttgaggaaccagggacagggaaagctgactataaattatataggtaaaacccctgcattgctcacaggtccactctaaatgtgaaattaagttacagcctcagttttcttaataacttaaagtgcttcatgaaataaaagtttctcagggatatttgaatgtatttacagatttaagttgaaccctgaccacatagattctaacaaatggagcaaaaccaactttacagatgtttagatatgattgctataaaaattcctgccctggtgaaattgttttgcaattattataaaagtctgtctcaaacggatatttttttttaataattttttttatttttcccactgtacagcaagggggtcaggttatccttacatgtatacattgcaattacagtttttcccccaccctttcttctgttgcaacatgagtatctagacaaagttctcaatgctattcagcaggatctccttgtaaatctattctaagttgtgtctgataagcccaagctcccgatccctcccgctccctccccctcccatcaggcagccacaagtctcttctccaagtccatgattttcttttctgaggagatgttcatttgtgctagatattagattccagttataagtgatatcatatggtatttgtctttgtctttctggctcatttcactcaggatgagattctctagttccatccatgttgctgcaaatggcattatgtcattcttttttatggctgagtagtattccattgtgtatatataccaccccttccgaatccaatcatctgtcgatggacatttgggttgtttccatgtcctggctattgtgaatagtgctgcaatgaacatgcgggtgcacatgtctcttttaagtagagctttgtccggatagatgcccaagagtgggattgcagggtcatatggaagttctatgtatagatttctaaggtatctccaaactgttctccatagtggctgtaccagtttacattcccaccaatagtgcaggagggttcccttttctccacagcccctccagcacttgttatttgtggatttattaatgatggcctcaaacggatatttttaaactatcaaagagcatatgtaaacatgatgaaaattaacaattctgaaaaatgtagaagactcaactttggcttagagttatgaagctagtgcctatgtgtgtgttatttgaaacattattgagatgctgtcagagtcctcagcagtgaccaaacagcattgtgggagcattctacagtatgacgtggggaaacagtcagggtttagaactggacagacctgggttttcatcctgctcttaccacttagaagtcaccagatctctctctcagtttcttcatcttccaacttagtttagatgaaccttacattttgtggtcataagatagacaacatgtttggtccatagtagatgttcagtaagtggaagctttatccactgtgttgttgagagagcgtcagcacttgcacacacattcagacatcctgcctaatggtactgaggaactacagcacctgctcttttgaaagctaggccccctacttgagagctggatctcaccccttcctgtcttctcaaggacatcgatcaagcagttttctctcttctgaaccacagggccaactgcatctcttcccgggtcatccccatagacacaggggcctcctggcatgtctgcccttttacgatgaaaactccccctaccaccacccagcttcatcccttgcaaagtaccacctcactttgtctgtctttctttctttctttctttctttctttctttctttctttctttctttctttctttctttctttctttctttctttctttctttctttctttctttctttctttcttttcctttgaaagacacttctttagaagagccatctaggagttccttttgagactcagcagtaatgaacctgaccagtatcattgaggacacaggttcgatccttggccttgctcagtgggttaaggatctggcattgccatgacctgtggcataggtcgcagatgtggcttggatctggcattgctgtggctgtggtacaggctggcagctacagctctgatttgaccacaagcctgggaacttccatatgctgtgggtgtggccctaataagacaaataaataaataagctgtctgtatgcactgttcccaattactcacctctcatgttctcttaaaccgactcctgactggactttcctataactgtgtcagtaaaaatgctcttgttactgtcaccagtgactctgctgctaaatccagtggtcaattctcaattctcatcttagttgacttattaggagtatttgacatactttgaccttccccttaaggtactctttttttttttttttttttttcctttttttaaagttggctttctcctcctccagtggcttctttatcagacccttggtgtgttctaaatcttttgccagacctctcaacattagagaactggtggatccagttctttgttcttttttctgtttgtactccctcccttgatggtctcatccactcttttgcttaaaattccatttatatatcaaaggctatcacactcatatatctaacccccacttcccttctcagtacagattgaaatatcctgacctagtttcataggtagggtatctccagtacacttcaaatttagcacaccccaaatttaattcctaatccaccccccaactttctctgtcctttagccttccccctctaagttgatggcaacactgtccttccacctgctcacaccagaatccttggagtggtcctttgactctctctctc

SEQ ID NO: 40 - protein, 274 aa, Sus scrofa
MKKTQTWIITCIYLQLLLFNPLVRTQGICRNRVTDDVKDVTKLVANLPKDYKITLKYVPGMDVLPSHCWISEMVEQLSVSLTDLLDKFSNISEGLSNYSIIDKLVKIVDDLVECMEEHSFENVRKSSKSPEPRLFTPEKFFGIFNRSIDAFKDLEMVAPKTSECVISSTLTPEKDSRVSVTKPFMLPPVAASSLRNDSSSSNRKASDSIEDSSLQWAAVALPAFFSLVIGFAFGALYWKKKQPNLTRTVENIQINEEDNEISMLQEKEREFQEV

SEQ ID NO: 41 - DNA, 32286 bp, Bos taurus
acttggattatcacttgcatttatcttcaactgctcctatttaatcctctcgtccacactcaagggatctgcagtaaccgtgtgactgatgatgtgaaagacgttacaaaattggtaaggaatgctttcaattgctctgactcttgtactttttgaaaaagatttcctttttttcttgccccagattagtgtctttcagagatcaggagaaaagtcaccgagttgtgctgaagggtttgtagggagcaggtcaggcgatacttgcggtcacagagcgtcttggtaagggtggcccgccgcacctcactcgagggactttgtttccttgctggcctcttcatctcctttgcaggcagtgaaggacgctggcgggtgctttgtctgctgatgtgtgagcactagcttgttccccattatctcgtaggcaagtttcattttccctccacacgtcttcctgctcttctctaaggagcctaacaaaaggaggtccgagctgctcattctcccgtttccaactgctctaagacccgttacacgcgggtgggtgtttgcccgctcagtaaacacagttggagtcgtttgttgccccagcgttgaccagacacatctcccacatccatcccatcgtagcctttcccccagcaaaagccgtttttcactagtgcccctttgtcactgccagcctctctcaagaggcagaccgcagagagcgagggcgtgacccagcctctgaaatggattcctcccgagcctcatgatctagcggcggctgtacgtgttcattggagctacactcttgctttcggagtgaacacactttgaaaagccgttttgtaagttcctgattttgtaagtgcccagtggcactcagttatatgaatattattttgagagcagagtgatgtgggttgtagtatgtaaaaaagaaaggaaagtatatttgttgagatatttatctttcctactttgatatgcatttcctggtgtatatgttgttattttgggttcataaccaagcttcaaaacagaagtttaatgttacaatctgagtcttgcttagcttagtctcaatgtacaattaagaatatacgcatacatgcacacacacacaccatgcagatttctttggatacctacaaagtccaggcttaaaagtattctctggtgcagtatctgaaggtgtatcaacatgttttatttgaggggctggtgatccaagcactataacatttgcctcctatatgcccagctgggtttaaggatgggctgggggaagtactttttcaaaacatagatcatgatccttttcctcaaattgcttgttagtttgttagccaaggaactatactaagaagaaaacatttatattcaaaatttggtatgggtcaaagaccctcgtgaaatgtttgttcaataaatgaagtaaggatgtgcatcactatgcagcaacaaaattatctgtggcgttcatgaaagtcacaggtgtctgggccccactgtttacacaggtctgaggaagggctctatgcatctacattttaaagatattccttaaaggagatttaagaaccattgctttagatggtttatgctgtcaaagtttagagaccaaaatattgtgactttactttaacctcatttcttattatgaccagttttatctacattgtatcagttcagttcagttgctcagtcatgtctgactctttgcaaccccctggactgcagtactccaggcttccctgtccatcaccaactcctggagcttgctcaaactcatgtccatagagttggtgataccatccaaatatctcatcctctgttcccttctcctcctgccttcaatctttattagcatcagggtcttttctaaggagtcagttctttgcatcaggtggccaaagtattggagtttcagtttcaccatcagtccttccaatgaatattcaggactgatttcctttaggattgactggtttgatcgccttgcagtccaagagactctcaagagtcctctccaacatcacagttcaaaagcatcaattctttgacactcagctttctttatggtccaactctcacatacataaatgactaccggaaaaaccatagctttttctatgttgtatgggtttacatatatgttagattaatatgagtctccaaaatagacttaaagtaggtcacagctgggaaattaacaactcttatggggttatttgtggaaccatggagctacaatgagcaggggagattggaagtagtcctaggcatccaatttcaaatatgtgggcaaggaatcacagatggaaggtgatggtgtatctgaccacaggctaagcatgtccaaaattaagttggcatttaagaaaaattacttattgtcagtattttttgctgtttgaagaatattacctaatgagcaccacttcctgtgaaatgtcaaactgatattttcaagtggcataagtaggtattgtaagcaccttccaagattttctgttcttgtctttaaccatctgcttattttcagtctgttacctatcagttgaaaaatgcaagaaactttgggaaagaaatgcctggaaagagatacttattaacagtaaaatattaatataattcctttccgcagggggaaatgtaaaatcattaagctggaaaaagtcttttttctcccttccagcaactgactcataggggaattttttaatttcaagagttgatctaaatgaaattagtgtgtttacttcagattattgggggaaaagtcaagttaataacaaaaaaggatttagaagatcacttctgattgaataaagacctacttaatgcacagccggtatttcatagagtaggaaattgaaagatataaaataatccctggtctcagagtgtttataatctagtttggggctaagccatctctatgaatatatgaaagcagatcactaataccacaataaccacatgaaaatggatgctatttaaaatattttctggtaaagtatgggatccgacttgtactgattttttggttagaatggattttagcatctgacagacatgctttttgaccttagataagaaactatctttctaaagctcagttcttcccaattttatggtgtagatggaataagagaatgtgtatgtgtgtatatatatatacatacatatatatgtatatatataaccacagttattgtcacatgatctctctgtgcctcagtttcctcatcattataatagattaatagtacaacaggggttagcagtgccaaccttttggcagtggaaaatcgtctcacagcctatagttggccttctgcatataaggttcctccctagctgtggtttttgcatccatggattcaacaagggtggattgtgtagtagtgtaatactattgaaaaacaggagtatcagtagactcacgaaattcaaacacgtgttgttcaaggatctactgtacttaacctcatagagtgatttcaaagattaaataaaagaacagtgctaggaacatagcaagtgcgtgctaaatattatgttagtaatggtagtatagggctcccttggtggctcagtggtaaagaatctctcaatgcaagagacccggatttgattcctgggttgggaagattccctggaggaggaaatggcaacccactccagtattcttgcctggataattccatggacagaggagcctggtgaactacagtccagggtcacaaagagttggccacacttagcaactgaggacagaatggtagtgtgatggtagtgatgtttgtggggtcatagtccatggggtcgctaagagtccgatacgactgagcaacttcactttcacttttcactttcacacattggagaaggaaatggcaacccactccagtgttcttgcctggagaatcccagggtgggtggagcctggtgggctgccgtctgtggggtcgcacagagttggacacgactgaagtgacttagcagcagcagcagcaggatactggagctgaatttagagaattcagaatttcataaataggaaaactgagatccgtgagtggtgagttccagctcctggtcccatacctgtgttgtcttctaggacagtggttttcagactggcttcaagagactacccagcagctctgcttttatttatgtttctgggtttctgaataaaacttgggtggaacaaagaattgagcttctgggaaaatgtttgcaaatcacgtctctaaaccaccgttttgtggaatattacttgagaaccatccagtcacaatctctgagggtccttatgaaaagtttagccatcagggccctgcctcagaaatataggattgcagctcatggagatgagatgtaggaagcttaatgtgttggactgacgtcccaggtgatagttatttgcataggtcaggactactgaggtaataaattatacttacaatatggggttgtttccatatttgaaaagaagtggcgttcccatccttagcctaaaactcattgattgcactaattcaaaccgggacatgagtgacttttcagttttatggctacagataaccacagtctctctctggagaacagtggagcaaaaaagcatcttgaagtaggtcaggcttactggggtgtttgataccagctctgctattacccagctgtgtgactttggacaaataaatctctgaacctttctgggattcaacttttggttttgaaaatgaggaattaggacatgatcagtagttctgaatctagaattcataaactttcaaactctttcaaatgaaattccaaattatgcttgctgtgtgccttatgtgtttctgctgctgctgctgctaagttgcttcagtcgtgtctgactgtgcgaccccatagacggcagcccaccaggctcccctgtccctgggattctccaggcaagaacactggagtgggttgccatttccttctccaatgcatgaaagtgaaaagtgaaagtgaagtcactcagtcgtgtctgactcttagtgaccccatggactgcagcccaccaggctcttccgtccatgggattttccaggtaagagtactggagtgggttgtcatttccttctccaggggatcttcccagcctaggaaatgaacccgggtctcctacattgcaggcagaggatttaccaactgagctatgagggaagcctagtgtgtgtgtgtgtaagaacatgtataacttttcatgcttcccagagaagtctgtaaccctccccccaaaagataagaactagcaaattggataactcgggaggcccattttagccctgagattctcttattccatagtcctgcctcttcagattgtacatgttggaataatccagttatgccttgactaaaggaggttatatcagattagatttacttcctttgcaggcataacgtatgtacattttatctgagaaaaagaaagtgggttgaaaatacctttgtaccctttgctcattgtaatttattcaactaaaatcattcctttgccaatgctgccagttctgcctttgctgtgggtggcaacttgcactctgcccacaaatcttaagtttgtttgcttggggtgactcccgtgtcacagaagcacatggtttgtgactttactgtcattttctttttaatttcttcttggacgttttgtactacacctgtagtccccatggtttctattttaaatccttctggcatgtttactcagcataatagttcatctgtttacagaactttttgctttgtttctaaaaaatgttgcaagacttgtgttaaaaggcagactcagacctacctaaagaaagggtgtttgccatacacaaaaataaactcaaaatggattaaagatctaaatgtaagaccagaaactataaaactcctagaggagaacataggcaaaacactctctgacatacatcacagcaggatcctctatgacccacctcccagaatattggaaataaaagcaaaaataaacaaatgggacctaattaaccttaaaatcttctgcacatcaaaggaaactattagcaaggtgaaaaggcagccttcagaatgggagaaaataatagcaaatgaagcaactgacaaacaactaatctcaaaaatatacaagcaactcctacagctcaactccagaaaaataaacgacccaatcaaaaaatgggccaaagaactaaatagacatttctccaaagaagacatacagatggctaacaaacacatgaaaagatgctcaacatcactcattatcagagaaatgcaaatcaaaaccactacgaggtaccatttcacaccagtcagaatggctgcaatccaaaagtctacaaataataaatgctggagagggtgtggagaaaagggaaccctcttacactgttggtgggaatgcaaactagtacagccactatggagaacagtgtggagattccttaaaatctggaaatagaactgccttatgatccagcaatcccactgctgggcatacacactgaggaaaccagaagggaaagagacacgtgtaccccaatgttcatcgcagcactgtttataatagccaggacatggaagcaacctagatgtccataagcagatgaatggataagaaagctttggtacacatacacaatggagtattactcagccattaaaaagaatacatttgaatcagttctaatgaggtggatgaaactggagcctattatacagagtgaagtaagccaggagaaaaaacataaatacagtatactaacgcatatatatggaatttagaaagatggtaacaataacccggtgtacgagacagcaaaagagacactgatgtatagaacagtcttatggactctgtgggagagggagagggtgggaagatttgggagaatgacattgaaacatgtgaaatatcatgtaagaaacgagttgccagtccaggttcgatgcacgatactggatgcttggggctagtgcactgggacgacccagagggatggtatggggagggaggacggaggagggttcgggatggggaacacatgtatacctgtggcggattcattttgatatttgggaaaactaatacaattatgtaaagtttaaaaataaaataaaatttaaaaaaaaaaaaaaagaaagggtgtttgggaaggtagtgaatcaaactttaaaaacttgtatctttgggtggttcaactgcagctcttaatgattgtgttgataaaaaaggaatccaaacattgaaatagatcaaattagtttttccttctgttctttctactgtttccttcatttatgatcatttttcttcgtttgggggagtttaattgaatgtgactttgctgctttttgaaaacatttttatctttatctgttgggtaattgtttgtcttccttaaaatgtttaaggcaggttgctgttctagcccccatcttgtaaaagtggaaatcactctgtcttttcaaggtcagtctatagatcagtagggtaaagtcagaaatttgtggctttcctggtctttcagtaggcaattattttaaacagattatattaatacatgcctcttatagtttgacataataggagattataaaaatattcttagataacaaatttcacacttcgagtggactgttttgaatagtgctgaatttttattctcttcaagtacaatgtttggatagaattatcactgcattaaaatggaggattggagtctctgctgctgctaagtcgcgtcagtcgtgcccgactctgtgcgaccccatagacggcagcccaccaggctcccccatccctgggattctccaggcaagaacactggagtgggttgccatttccttctccaattggagtctctgagtctccccatttctaagtatatcttctctttaaaagcagaggtcccccatagttttgtttgaccattgaagaacaatggtttgatagctggatagtttttaaagttgattttttattaatttgcaatatttagcattttactttctactcctgtagtcagtacatttttttttctctatttaaagtaaattttggacttagtatttaaaggacagagtatattagaaataatatttgtaaaaactgactagctgtgttgccaagcatgtaaatcttatcataaagaaaatgttgttcttcctttgtaagataaaccacttaggtacagtatctcctgccccttgacttttttacagcagatattattgtgtgaacatctaagcaccatgcaaagcactgtctgtggattctctgttttagtcattgcaaccctagaaggtaatgattttgtccacctgtgtattctttactgtctgggtcaaagggaagcctgactaatgcaccactgtattgattaggcagctgaagcctagtgatggttagtaacctgatgattctcacttggaagctgggagatgaatagaggtatgaacccataactgcccatctctggaacataagaacccggttcataatttatgatgtctttacttatgtcagtatcgactgcaatttaagaactatcattctatcctcttgaattgtacttgctaggtagaagtcatcttattttatgattaggaaattatagattagtactatttaacaggagtcatcatcataaggtatgtttatgaagcagaccaacattttaaaattaatttttattggagtatcattgctttacatgttgagttagtttctgctgcatacagagtgaatcagttatacatatatcccctcttttttagatttccttctcatttaggtcaccacagagcatttagtagagttccctgtgttagatggtagagaccaaatgtttttaatctcttttatttgaaggagacaaggatcatctaaacgtatttaggtattcttcactgagaaaagacccagaaaggcttgtgagttgtcatgttaattttttctaaatcactaattgagttattatttaaaaaagaaaaaagcgattgacctggttagatttttagtcagtattaacaagaaatggcttataaggggaaataaaatggcaaaagctttgttctgtgttatttctgaagactgaacaaccattgttacactaagctgtggcatggagtaaactggggtattactgggatattttaagtacatgcatagaaggctttttttgctctaagaatcagcggtgattcttaaacttctctgtgtctcagagactttgagaactggactcttccctcagaaaggtcaactatgtgtgcgctgctttatgtagggtcaagggaatcatgagttactatcattgcgttttgattcttatcaagatcttgacagaaacaactgagacgagtatctcaccaaggatgtccaaaaagccactgatttcacaagactgagagacttcagtgatgtttggatcttgagatccaaatcttttagatcagtgatctagagagggagttaaatgttctgactttgacttctttttctgcagggcatggtaagcagccaatgactgtttggcttgcaaagactttttcttggccgagtttctagcatttccacatgctattctcttaggcatttcccccctagtgtcactgagtatgatcaatccttaagatatccaaaaaaatgaaaagatagcaagtgggcctgtctagtaattgagtgaaagtgttagtttctcaattgtgtgcaaccccttgcaaccccatggactatagcccaccaggctcctctgtccatgggagtctccaagccagaatgctggagggtgttgccattcccttctccaggggatcttccctatccagggactgaacacagatctcccgtatcccaggcagattctttaccatctgagccaccagggaagcccatcatatcacaaagtgacttgtttcagaagttttatgcattttctaatctagtacagtgtttaaatccttacactccaaaccatttctttcattggaataacttgagatttggtaaattttccatcatttaggttctatttcattttaatttttgccctgaacttattttaccaggacagttaggtttacaaagtctgtagccttggatatgaatccatataaccttaccagcaggatgcttccttggaatctaaagcacatctctgctttttcagcttttaatctctgtaaaaatatttaatgtgtgttcagtactctcccactggtcttctaaactgcccctggtctctcttctctctttgctttagtacatacttccaaagtgctgctgctgctgctaagtcgcttcagtcgtgtccgactctgtgcgacgccatagacggcagcccactaggctcctccgtccctgggattttccaggcaagagtacttccaaactaaccttcctaaattgactgtcacgttttcttcctgcttaaacacactcaatgtagcaccactgcttacacgaggaaggtaaatccgactgaattcttagtaattttctccttcaacttcttcatcttacagatgaggggtataggttccacagggaggaagtgatgtgcctaagacaacagtgacctgtagggatctagtggtggaactggttccactgaaccttactgcttcccacctggcctccgtggcccaacattcaggtccctcactgatgtgggctggctagagcctgaatgatctgcccctggtctaccatgtctctgtctttgcagatgtccctctcccttgcaattaataagtactcgtttacacacaacactaaataactaagtattttaaataagttacattatccttgtatagtcttaataccagctcagttctgtgatccccattttacctatgtggaaattgagactaaagaagatttggtaacttgcccaagatctctgaattagcacgtggcaggacctggatccagcctgagcagtgtgtccccaggacctgtgttgggagtcctttgtcaaagtaactgcctcgaaggaacagcttatcttcctagttccaggccaaaggctccctctactctctcagatttctgcagtgctcaccatgcataagagaaactgaatttatcacgaggttatctgtgccttttggatgctattcaacatactgtgaatgcttagaaagtaatataataattcatgaagtggccataaaaaatatacaacttgacttccttaattctcttccaaatgtgattggaaatgaaccagtgcaatccaagaaagtaataacgcgcagactgatccacagataactgctgagaccagcactcagagccgggatttgtgtgctcactcgcactgtgtactcatgtctgtgaccctgagatgccacttaacccctctgagcctccatgtatcgttcggtaaaatagacccaataatatgtatcttggttgtggcagagactgtgtccaaaaccttttaaaattttaaagcatttttcaaaaatagtattccttttcagatcccttagaaactaaatatcagtaaatcagtttaaggcagaaattattatgatatactgcccccccccccccaacccagtgtggtaagatttgtttgatttttttgcaccaattttttacatgtcaattactaacaaaacagaattggccagcggatctttacatttcctctgttctcttggtacatactcagatcataagttttctgaatactaatttggtcagttctgtgtttattttccgataatgttaattgtgcataaggaagggggatagattgtcaagcgcctgtgttcagaacacctgccattttgtgccatttctccatctggaatggctttcacttacctgttggttcgtaacaaaacagaatggtgcgctcattctgattccagcttttatacctgtgaagctgttagctctgttttccaccagggcttacataaaatgatgaggtccgtctgcttttcaaatatgggggtgaagatccacagacagaagaaatcctggaagcatgatgggaagtttggccaagagaaagaacgttactgtgaaaagtcaccctgaacttaaagaaggccaccttctgtggcagtgcagatgtgttctcagtaagcagtgcagacttgactgttctcttgcgggtggcacgaggagggatgttggtgagcctcacaagtgggaaatatctgggacaagtgtgcagagagtaaatgggtgaccatgtgtaagttgagctgagaggtaatggaggccccgctgtcagagacctgagttctagtccagacttgacaggtagtagtcgtgtgacctcagtcaagttacttgacctcttggagtcttaagttcttcattcattaatttagcaatcctacgtgaaagtgattctgagggttggatgcgatcacacaacataagcccataatgagcacagtgctagaacatggtaagtatttggtaagtgttaggctggaggctgagatgagagggaggtggttccattggacgttggatggtagcacgcatgatgggatcccttcctcccttggctcccctctgactgcatatgcctttacctagattcttttctcagcaaattgttctcaaattctagaagctattggcaaagccaagaagaaacataagggttgtgttctgggagtcttgtcagagatgaactagcctgaaaatatgcaccaggtactagctcacgatggagaatagtgatgatttaagaaacagggtaaaggggaaaatgagtctgccggagcagggagacccactgaagatataatagagcaaaaccgcatttttacattgtctattgttttaagacccagcgggctaagtcaatttgtacataaaataaatgggccatattctacagaaggaaattttaactgttctagaagagtgagatgtcagagctggtgatatgtagaaaaggagacaagtgaacttaaaactctgtgacttactagaacttgtgccttggaagtcagtttccagtatagctctcagtaaagaatatggattgattgtttatgatgtttggcacactcatctaaattcttaaattgactcttagacacgggtacttttttttttagttggaggacaactgctttataatgttgtgctggtttctgccttacaaccatgtgaatcagccatatgtatgcatatattccgcccgccgagtctcacccccatctccactgtgataggtcaccacagagcaccaaactgagctccctgttatacagaagtttctcactagctagctattttatacgtggtagtgtatataggacatggatacttttatctccactttacagatgagagaaaccaaagtagagttgagatttgttctaaatttcctggttctaaatcaggtgcttgttcaacttatgccacaatgaatgatggaaatgggttagatattttctgaaagtctttaaaggaagctagttaaacatttgaggcatctcatacatttagtcccaggcaagtaggttacattatatcacagaactgaatctttctaaattaattaactgataaagcatgtgcaacttgtaagtatcattgttcttttgaaacttaacacttttttttctaggattaacatagaacagtagttctctaacttgagcacacatcagaatcacctggaggacttgtttagtaagattcagtaggtctggtgtggcctgagactttgcatttctaacaggttccctggtgccgttgacgtatcacttggagaaccacttaacgagaaaaatacactgtgttactgatccttcggaggaataaataggaaaatagtcctgaagggaaattccaagaccacagatggaagctgaaattcaaatcatgtttccaaactcagtaaattatcgttagccacccataactgaatttggagtgaaaaaagatttgtattattatttcatttctggagagtgcttttgattgcaaagggaaatcaagaatgaaaaatcactatgtatgtaaatgttgaaaatcagaggtaatttaaaagcatcctgggtttgcaggtgtttttctctaaacccctaaaaacaatatgatttactgatgtgtatggattttcttacagatttttttttcttttggtctctgtaggtggcaaatcttcccaaagactatatgataaccctcaaatatgtccccgggatggacgttttggtatgtaaactgtacatttctgggtttcattgtggtagctgacaaaagaaacggggtcattcatattgagataggaagttatctgccatttaagagtttgctaactgtcagaatttgaagaaggtatctttggaatttgacttgtatatttatattttttcctcaggcaactgctaaattttggtttggggtgaacatttcagcatgtatcttacccctatactcccaaagcacataagatcaccttctttatagctagccactgacttctgtttttctttcagccttcctacaaacaaaggctcaagtgtaaaattatgtaaattactttcatacctgaaaaaggtcctatataagtctcctatttaatttgagaacacaaaatgttttatctctgagtttatttgcagtgtgattgattcttcaaaatttacaataaaaaggtagctatgattgtacatatgcttttatgactgtaaccaaaaattttcattgatgttctaattatgtagtgttagtattaagacatgaagaaatatttcacgtatagggactaatgtaatgcctgtggacccgtcacataacttgtcagatgttaccattttgcaatatttgcttcagctgtattaattggagtataattgctttacagtgttgtttctgctgtacaatgaagtgaatcagccatgtgtatgcatatcctttctctctttggacttctctcccacccacctccaccccacccatctaggtcatcacagagcaccaagctgagcttcttgtgcttttatatatagatagcaggctcccactagctatgtgttttacatatggtggtgcatattaggtcaatcctaatctcccaattcattctaccctttcccccatccctctctttcccgtcatgtctgcaagtccagtctctacctctgcatctctattcttgccctggaaataggtttcaaatgtactttttaatagtgaatcatgataaatatagttaaagccccatatatgcctctctcctatacccttaagtactagttttctcttagggagagcttatctcttaggaataagtattctgagctggagtttctcattccaatgcatgtttccagggcttgacataagggtaccatcccctcagagttgtgttgagtgtaacagcccacagtagccctactctttcttatactttgatagcaaactctacatccatatatatatgattccatgttttgcatattttatgttgataccattataatgcatatatgactttacaacttgctcatattttgcaaaatgcttcgacacataatatgttccatgttgattcactttaactactgtattgtgctcctttgaattaatttaaagccacttgggttactctctgctctgcaaattgacatctttttataacaccaaaaatacttattacacattgacttcttgcaagttgactttgagtcctttctgtggacacatccatcaaaattattaccacttcaagtgtgttaataagcatgtcactatggcaatccactccagtgttcttgcctggagaatcccagggacgggggggcctggtgggctgccgtctatggggttgcacagagtcagacacgactgaagcgacttagcagcaaattgttgttgttcagttgccaaatcatgtccagttctttgcaagcccgtggactgtagcttgccaggcttccctgtccctcaccacctcccagagtttgcccaagtttaccattgaattggtgatgccatccaaccatctcatcctctgtcaccctcttctccttctgccttcaatctttcccagcagcagggtcttttctgatgagtcggctctagcaccaagtggccaaagtattggaacttcagcatcagtccttccaaagagtattcagggttgatttcttttcagattgactggtttgatctccttgcagtccaagggactctaaagagtcttctacagcaccacagtcaaaagcaccaattcttcagcactctgccttcttcattgtccagctctcacatctgtatgtgactactggaaagaccatgtgaaagtgaaaatcacgtggtttgtctgactctttgctactccatggactgtagcctgccaggctcctctgtccatggaattcaccaggccagaatactggagtgggtagctgttccccttctccaggagatcttcccaacccaggaatcaaaccagggtctcctgcattgcaggtggattctttaccagctgagctaccaggaagccctagacttcactatatggacctttgtcagcaaagtgaggtctttgccttttaacacatcgtctaggtttgtcatggctttcctgctaagaagcaatcattttctaattttgtgactgcagacaccatccacagtgcttttagagcccaagaagaggaaacctgtcactgcttccacctctttcctttctatttgccgtgaagtgatggggctgatgccattatcttagtgttttgttttttttttttaatattgaattttaagccagcttttttactctcctctttcaccctcatcaagaggctctttagttcctcttcgctttctcccattagattgatatcatccacatatctgaggttgttgatatttctcctggcagtcttgattccagcttgtaactcatccagcctggcatttcacatgatgtgctctgggtataagttaaataagcacatcactaagtgcttgtgtttaaaaagtcttccaaactttgtaaggttgtcattgcaagagcattctcttgaaagacatatttcttttcattagtccatgctaaaatctttactatctactaaattccgtagaattccttagaacatgtaccttcttgttgaaccaggtacctctttgttgacctagcaagtctaggtcaatctctgtcctattgaacaagggaagttctttgacatagtaatgtaaattttatagcagcctgaaccttaattgatctaatcatctgctcattcagcaagtacttgtttagggaaaactatggagcgagcactttatgagacactttaagaaacaaacaaacatacatcaattaaccttatgttcaaaaaatagtaattatggggttcagtgtagctggccttttcataatgcttttctacttgcaaaatgacttcacatttttatcttcttggatgattagaaaaataggaaagcaggatggctactgtgattcttattatacaaatgacaccttgagctttataaaccagaagcattttgaccaaggttaaacaattagaaagtgatagtcttaaaaagaaatcctaggccatctgactcttaacccttcatgtgggtatctattaatagcaaggtaaagagttctcagtgaagcatctacgtaataaagacataccctgttctgactagagatgcacttaggctgggactgccaaattcatttaaagaaatcatgcaactctttgaaaaacaattgtgttaaactaaaaatagcaaaatagattcttttgtgctggtataatcatagattgtgccgaatcatagatttccgtattggctggtgctaacaagagctaacttataaaaataaaatgattcattaccacctattttttcccccttgtttctgtaattgagaaaaatcctctattatttggtcttggcataccatcctggcacaattggaggaactctgttcttggctaccacagttggcaagaaaaacaaacccgaacatagcctttgggtagaaacagggggtcatatgctttgttttaccttcatttaaaaatgttagtttcttccaagaccagaggagtttcccagtggagaggctcaggcttatttgccttatcttttgtctttaaacaatacagggtggagtgggagccagaacgggtaccagaaatagtctctggggccaaaccaataaaattctgctggaggccctgggcagaagaaagctctagaatagaatactttttttttttttttggtttggttttaaaaatcaaccagatactcctgaaaaggggaggttacttttctaagtgcctttttagaaaattacccagcagattgtctctcacaaatagccgggtatgatccactggttggtatttaaatctaacgataattaccaattttagtttaaactctttgaaactataatattgtcaaacttaggatttcctttaaattcttagcctaaaaatcctaaatgtttctgatccttttcacttactagtcatgttgtagaaagaacagaaattgagttgctgaatctgcagtcattctggcctctctaaaatgatataaactatgagttgcttgtggtattggcataataaagttaattcgcttttagttaaattacatacttaccactttttatctaactttttagttgaaaatacttcgaatttacagattataagaatatacacccatataccttttaatacagattcaattgtttttaacattttgcttcatttgctttataaattcttgctttctgtatgcttatatctaaaccccttgagtaagttgtatacaaaatgactgtttacccctaaatacttaagtgtgtgtttcctaagtattttctcttacataaccacagttgtccacttgaataaatttagcagtaactgaatacttcaatctgttggctgtatttcaatgttaccaaatttttctggcatgtttttcttctggtacaagatctaatctagcatcatgatttgcattttgatactatgatcggcagaataatggtcccccaaagatgtctcatgctgtgactatattaccttccatggcaaagagtctttgcagaattaattaaggatctgaggatggggagggtatcctgggaatatccaggtggacccaatctaatcacataaatccttatgagagggagtttaggaaccagagagaaggtgttacacccctggctttgaagatgaaggggccacaagccaaggaatgtgggagatccctgaaacctagaaaagacacagagaaggagattcttctgtagagcctctagaagaaacaccatgtaatctgtggtcactttgatttcagcctgttgtttttgttcagtcactcagtcctgtctgactctttgcaactccatggactgcagcacaccaggcctccctgtttttcaccgtctcctggagcttgctcaaatccatgagtcagtgatgccttccaaccatcttgtcagaatacgcatcccaaggtgtgatgctacattaaggaatgatgtgtcctctagttatcacacccagaggcacagtgtccatcttctccccatagtgctgcttgttttaatcccctggttcaggtgttccactatttctgtgtatttactcattaacaactaagctgggatctttgggaagatacttgaagaccatgtacgttccttcatcaaagttcctcttgtagattgatttttacatgaaccagtctttactgtcatgtcagtttttatttttttaaaagtcaaggttaaacaaagaagtcattggcaatacataatgttatcctaaaaacatggatcccagccatcacccctttggatgattttactttctcaactatttgtacctttttttgctggtctgccccctctgggtcttctcacatctccctcaccagtcaaggatttattacttgatatttcaactcttctttaaaggacagtggttcttcaaaacaaatacacctggtcattttatccctcttcttcatatactttgaatggttgctcttaggaaaagaagctccttaaacatggcctccaagactctggtgatctggcacctttccagattcttcttcagtcctgcagcctcacatgtcccttgctgcccctgttcctttcctgcaagtctttctctgaacctagtgtgctggtcaatccttttcttgggataactcctctttcattttctttttttttcttctatgatttttcttttttaaaagaaaatgtttcaattgaagtatagttgattgttcccaggagatagaggacagggaagcctggtgtgctgcagtccatggggtcacaaagggtagaacatgacttagtgactgagcaacagtagttgatttataaatgttgtgtcaatctctgctatacagcaaaatgactcagttttacatatacatacattctttaatattttttccattatggctaatcgagaatattggctatagttctctgtggtatacaataggaccttgttgtttatccattctaaatgtaataattggcatctactgaccccacattccttccccatttcctggcaaccacaagtctgatcactatgcctgtgagtgtttctgtttcgtggataggttcatttgtgccatattttagattccacatggaagtgatgtcatgatatttgcctttctctttctgacttacttcacttggtgtgaagttttatccaggtagctgcaaacggcattattttgttcttttttaagacttagtagttttctgttgtatttatgtaccacatcttctttatccattcctctgttgatggagatcggagaaggcaatggcaccccactccagtactcttgcctggaaaatcccatggacggaggagcctggtaggctgcagtccatggggttgctaagagtcggacacgactgagcgacttcactttcacttttcactttcatgcattggagaaggaaatggcaacccactccagtgttcttgcctggagaatcccagggacgggggagcctggtgggctgccgtctatggggtcgcacagagtcggacacgactgaagcgacttagcagcttagttgatggagatttaggttgtttccctgttttggctattgtaaatactgctgctatgaatataggggtgcatatatctttttgaactgtagttttgcccaggtatatgcccaggagtgggattgctaaagatcatatggtagctcaagttttagttttctgaggaactgccatacttttttctacagaggctgcaccaatttacattgccaccaacagcataggagaatttccttcgctctgcaccctctctagcatttattgtttgtctgacaagttcattttcaatttcacttctttaaggaaggaagcctttactctccttgaggaagccataccctcatattagaaacttttaatagtactcctagaatggtagtgcttttgtttatttgtgcaactatttagttgtaatctatttacctataaacttcctgagggcaggagttctgtaattttgcttgtccatccttactgtccaatgtatgactattgttcagttgctcaatcatgtctgactctgcaactgcatgaaattcagcactccaggcttccccgtccatcactatctcctggagtttgctcacactcatatcctttgagtcagtgatgctatccaaccatctaatcctctgtcgtccccttctcctgccctcaatccttgccagcatcagggtcttttctaatgactgggcttttaacatcacgtggccaaagtattggagcttcagcatcactcttttcaatgaatattcagggttgatttcctttagcgttgactggtttgatctccttgctacccatgggactctcaagaatcttctccagtaccacagtttgaaagcatcaattcttcagtgctcagccttgtttatggttcaactctcacatccttacatgaccactggaaaaaccatagctttgactctacagaactttgtttgcaaagtgatatctctgctttttcatatgcagtctaggtttgtcataacttttcttccaaggagcaagcgccttttaattttgtggctgcagtcaccatctgcagtgatttgggcacccaagaaaacaaaatctgccactgtttccactttttccccatctatttgccatgaagtgatgggaccagaaaattagagataccaagggaacatttcatgcaaagatgggctcaataaaggacagaaatggtatggacctcacagaagcagaagatattaagaagaggtggcaagaatacacagaagaactgcacaaaaaagagcttcatgacccagataatcatgatggtgtgatcactgacctagagccagacatcctggaatgtgaagtcaagtgggccttagaaagcatcactaggaacaaagctagtggaggtgatggcattccagttgagctatttcaaatcctggaagatgatgctgtgaaagtgctgcactcaatatgctagcacatttggaaaactcagcagtggccacaggactggaaaaggtcagttttcattccaatcccaaagaaaggcaatgccaaagaatgctcaaactactgcacaattgcactcatctcacatgctagtaaagtaatggtcaaaattcttcaagccaggcttcagcaatatgtgaaccatgaacttcagatgttcaagctggttttagaaaaggcagaggaaccagagatcaaattgccaacatccactggatcatggaaaaagcaatagagttccagaaaaatatctatttctgctttattgactatgccaaagcctttgactgtgtggatcacaataaactgtggaaaattctgaaagagatgggaataccagaccacctgacctacctcttgagaaacctgtatgcaggtcaggaagcaacagttagaactggacatggaacaacagactggttccaaataggaaaaggagtatgttaaagctgtatattgtccccctgcttatttaactcatatgcagagtacatcatgagaaatgctgggctggaagaagcacaagctggaatcaagattgccaggagaaatgtcaataacctcagatatgcagatgccaccacccttatggcagaaaatgaagaggaactaaaaagcctcttgatgaaagtgaaagaggagagtgaaaaagttggcttaaagctcaacattcagaaaatgaagatcatggcatctggtcccatcacttcatggcaaatagatggggaaacagtggaaacagtgtcagactttctttttggggggctccaaaatctctgcagatggtgactgcagccttgaaattaaaagacgcttactccttggaaggaaagttatgaccaaactagatagcatattgaaaagcagagacattactttgccaacaaaggtccgtctagtcaagggtatggtttttccagtggtcatgtatggatgtgagaattggactgtgaagaaagctgagcactgaagaattgatgcttttgaaaaaactgtggtgttggagaagactcttgagagtcccttggactgcaaggagatcagttcctgggtgttcattggaaggactgatgctaaagctgaaactccaatactttggctatctgatgcgaagagttgacttattggaaaagaccctgatgctgggaggcattgggggcaggaggagaaggggatgacagagaatgagatggctggatggcatcactgactcgatggacgtgagtctgagtgaactccgggagttggtgatggatagagaggcctggcatgctgcgattcatggggtcgcaaagagtcagacacgactgagcgactgaactgaactgaactgaactgatggaaccagataccatgatcttagttttttgaatgttgagttttaagtcagtattttcactctcctctttcaccttcatcagaggctctttagttcctcttagctttccaccattagactgcatatctgaggttgttgatatttctcccggcaatctggattccagcttttgagtcatcctggcctgcatttcacatctgcatataagttaaataagcagggtgacattacacagtgttgacatacttctttcccaattttgaaccagtctgttgttccatgtctggttctaactcttgcttcttgacctgcattcaggtttctcaggagacaggtaaggtggtctggtattcccatctcttgaagaattttccgcattttttttgtgatccacagagtcaaaggctttagcgcagtcaatgaatcagatgtttttttggaattcccttgctttttctatgttccaagcagatgttggcaatttagtatctggcccctgtaccttttctaaatccagattgtacacctggaagttcttagttcatatactgctgaagcttagcttgaaggattttaagcataatcttgctagcatatgaaatgagcacaattgtatcgtagtttgaacattctttggcattgccctcctttggtattagaatgaaaattgacctttttcagccctgtggccactgctgaattttccaaatttgcagcatcatcttttaggatttgaaatagctcagctacaattccatcacctccactagctttgttcatagtaatgcttcgtaaggcccacttgactttgcactccaggatgtctggctctaggtgagtgaccacaccatcatagttatctggttcattaagatcttttttgtacaattcttctgtgtattcttgtcacctcttcttaatctctctgcttcttttaggtccttaaaatttctgtcctttattttgcccatttttgcatgaaatattcccttgatatctccaactttcttgaagagatttctagtttttcccgttctgttgttttcctctatttctttgtgttgttcaacataagaaggctttcttgtgtctcctcactattctctggaattctgcattcagttgggcatgtctccctttctcctttgcctttcacttcttttctcagctatttgtaaggcttccttagacggtcattttgccttcttgcatttctttttcttggggatggttttggtcaccatctcctgtaccttgttaggaacctccatccatagttcttcaggcactctgtctatcagatctaatcctatgaatctgtcacttcctctgtaaatgataagggattggtttagatcatttctgaatgacctagtggttttccctactttcttcaatttaagtctatattttacaataaggagctcgtgatctgatccgtagtcagctctaggccttatttttgctgactgtaaggagctgctccaccttcagctgcaaagaacataatccatcgatcatctggtgatgtccacgtgtagagtcatctcttgtattattggaagaggatgtttgctatgaccagtgtgtcctcttggcaaaactctgttagcatttgccctgctgcttttgtactcaatgtatgataggcacttatgtgctgaaagtgaagatggaaggaaggagggaagttctctcacgtgtaatcacttgtaatttccctgaggtaccaactgaatagaatccatagattatgatgatgcggtgaatgactgtaactcatcacacagtttttgcacctcagtgttttactcatcttcttttagatatgtacacatttcgtaaaaaggtttaggtctaagagtaatatcatgctattttcacgaatcatgatttccatgagccttctgttatgctgctacttttaactgagtcatttccttaatcaagaactttctcattgttctcagtgattgaaggctgaaagccagattcctgagtctgatgttcataagcttccataataaccttcttgccccacaccaatcacctcatcttaatgcccattattttgcaacacaaactcgtctcccagtcaggtgagtcccaccctcctagaatcaccttgaagtgaaagtgttagtcactccgtcttgtccgactgttggtaaccctattagcccgccaggctcctctgtccatggaattctccaggtaagaatactggagtgggttgccattcttttctattctcaattccaagactgcatggtttagcttctctttgctaggaatattctttcctctcccacccactcatccaaattctatccacagaattatgcagtatcctgggactgagtgcatcttagtggtcatctcctccaaggtcagcttaagatccctatttctcataagaccatttcctactgtcccagagcacgctctcttccctgcatcagtggccagtaaaaactgacaccacccctaatctatgcttctgctgggtgcttgtgtgggacagggtgatgagcaatactgatgtggtatctattctgtgggccttatctgttactttattatctctgaatttctatagaatttgtctcgaaactaatcatttggggtgagtgagtgagtgatgtcgctcagtcgtgtctgactctttgtgaccccatgaactgtagcctaccaggctcctccatccatgggattttccaggcaagaatactggagtgggttgccatttccttctccaggagatcttcctgacccagggattgaacccaggtctcccacattgcaggcagacgctttactgtctgagccaccagggaagtccatcatttggggtagttaatcatatattgcttacacagctatttaaacttgtatgtgttatggatctgtctcatagtattgttatgagaagtgattaagatgtgaaaaacccaagatatagtgtacatgcaataattgttctatgtcctcacaattatttttatgttatattttctctttttactatatttatctaaagattagggatcaacccttttaccctgttgtatttccttaccatttgagcaggtactagctactcaaaagctacttaccagtaaacatttaactgctggcccaaaaaatgtctgatttacaaatcttgagggagcctcccttatttgtttagattcctttggttcttgctaacagtaatgaaatcaagcttcaccaaaaaaaaaaaaaaaaaaaagtcccattactataaggatactgaagaatagcatttcaagtcaaggggagggatgcagccaggcctcatgacgggattcaggttttcctttccccttctctgcctctctgcctcattctgtttcacctgtgcagaatttgtgtgtgtgtgttttcagtcacctgatggcttaatagctgccccagagctcccacactcacatagtacagtttgaccctgctcagagactagttaccagttcttatcactactacctttttgggggagggactttccgatggacccatttgtctcaggatgccgttattgtccagtcagctgtggctactgggcaaggccactgtttgtaattgtggatcctgaggatccacccctatgatttgaaatgcttcctatagaaatggaagtcagtctggtagacactgtacttgtctacttctagctctcatataatatttctttcaaaggaataagtataaaatgttagctaaatgaataaaacgttaacattaaacactattttttaggtggctcttttgtatactcaaactacagggcccatcttaataagtaggtggttacattaagatactttcagaacatctagaccattactacctgaaaaaatagcatagaagccacatgttgttaagttgcttagtcgtgtctgactcgtgcgaccccatggactgtagcccaccaggctcctttgtccatggaattttccaaacatgaatactggagtggattgccatttcctcctctaagggatcttcctgacccaaggatcaaacctgtgtcggctgagatcttggcaggcagattctttaccacagagctatctgggaagcccagaagccacatatataatgttaaattgtccagtagctgcattaaaataaaaagaacatgaaaattataataaagtttattagtctaatatattcaaaatgtgatcactgtaccttgtaaaccatataaaattatcaacatattttaatttttaatatttattcagaatctactgtgtatttcatatctacagtacactccagttcaaacactaaattttcatcagaaatatttactcatttagatttttataaaattgacaattgaaaacacagattcacatacctaagcttttccaaagattcttaaaagtgttccagtcaccaaatcacataataattttctaactttcaacatgttgaattagttaagcaacattaatattttagttcctcagtcatactggccacattttgagtgatgagtagctgaaggtggcaaatggtccctctattggctcacacagattagacagagatattttagagacttgcctaaaatcacaacgtgtgttaacagagttaggactagacagcctctagttcatcagggccgccctcatctcccatgttgacctttcttcctggtgctattttgtatctggctcagaggccatttataggcccgcctggggaaacaacatgtatttatagtgtttggactgattaccatcttaatcagattgaggtttctactcgctttaattaaagcgagaaaatgcagttagatgtctgcagtgaacactgaagacccaaattaattgtttagagagaggactaaaataaatcatgacaaaacccagctcaaaaaaggagttaagattttggagactctacagcagtaacttgagcacacaatattttacgacgtgtttttgtaggaatgttttaaagttgcctgcccatgaaatgttcgagattggcaaggagtgtctgctttctggtcctaagagtaaaaaccagaaggagtaaggagagtccattaaagtcaattgatggtgatggtttagtcgctaagttgtgtccaactcttgtgatcccatggactgtagcccacccaggctcctttgcccatgggatttcccaggcaagaatactaaagtgggttgctattcctttctccaggggatcttcctgacccaaggatccaaccttggtcttctgcattgcaggtggattctttactggctgagccaccagggaagcctgctgaaagcaattagcatttgcaacagttactggaagaaatctggttcctataatgtagttctggattcattgaaatgagacagagccatttctaattcctaagtaatctcttaatcgagtttaaggaccagtgtgtctcgtccagaagttggaccacacgagtcatggagaacccagcagaagaaagtgctacagctgtatgtgttttgactgtatttactgatgaaagaactaggcaagggcttgggagtctcggtttctaatatttgttttaaatttgttgtgtaaccttggtgaaccacttcactgcttgagaccttccttgattttcccatttatgacattggtgggacgggaccagatggcctttagcatctcttccagatctaaagcattgtgattctgttggcatagtgccagattctttttgactgaccagccaggaggtaaatgctggaagcacaagaggaaagaaaggggtgctttgtgcctgtgggcattcatacttctaattctggcaagattgaaggttgacacacattaaagaaaacaaaacagaaacaatcaaactgggcggtaatgctggtaagtagattagttggattagaagatggggtggaaggcttattgtgaatattcctcagaagcctcatagtttatgagccagggctttgctccctcagaatctctaatgggtgttgtaccccagctcctttgtggagaattccctcacagtgcacatacctccgtgaggcttcctgacgaagcagacacatatctcccaaagaacagttactaaacggaaaagtagtgccaagtacctccgtgaagaaacgttagtgtgtgttttgtccactttcagattctagttccaaaaggcttctggactgctcttggagactcttcatctaagactgatgcagaatcctgtgtcaaatgttttcagctaataaaccagaagtttcttaaatgaagcagaggatggagagaagaaggcaggccagatttagcaagtctctcagatgtttttatttcagtcacggtctcaaatttaccagttctgggtctgcagagatattatatcacacatcctgtgaaattcacgtatctattttatatttgtgtgaatgtgtgagttttcattgttggtttttggaagtggtcatattcttaattatgtttagaatgctttcaatcatagtttttctttttttaatcttattaatttggtgcttatggtactttaaaatccttaggaagttcatagtttttacccagatcttctgtggtggtggcatgcgagcaggtcaaggacattgatttaatgtcatcgattcagttagcattctagaatgatacatgttatatatcatttatatatacacacacaaacatgaatagaaagcatatgttgctccaataatcctaagtagagctgttataattgatccagaaaatgtaagacagaggctaccaaaaaagaaggtaagaaattaagagtatgaagttaaggaaaatccagacaaattttccctttcaaagcaaaaaagtatatttcttttggtgtgtatataggtgaataaaacattacgttatatgtacttcaggaatttgaaacatactctttacatcaactctttgatgtcctgtctgactctatcaactttactgatctttcacattcttctagtgaaatagagaatgttatttatatcttacattcttctaatatctattgtgagttaatagctgtgcaatataaaactatttgtttaaaatggtctctgaaagatgagtgacagtaatgcctgtttattaaggtaaaggaaaaatttaaatttgtgaattgcacacttttaattatctatttcctaatcataataatcttgtaagagttgaaaaacagacttcatatcatctcacaaatgaaatatttaggtcactgtgttttgctgtctacaaatcattgactagatttaattaaaaagaaaatgtgaatctgcttgatgttctagtcaaggctggtttcctttcttgtaggcagacaagttaaaactggctgatagttaatattgtttacctcagttttatctttcctaaatgcaataaactttaaaagctaaaatatagctgtttaaacagattagtgaaaagaaataactttgaattgattatatagtctttccaagaaaattatgcagaatgtataatgaatgaaatacagttaaaggtgtttagaaatatatttttcagcagtgtagtctcgatgtttatgtcaaatatcaatgaatttttcataactttaaaggggcagatattgggctaggattcgattatgggatttccatgatttaacagtaagaaattacaggtttagggttgaaaaatgtttctgggaaaaattgattgcttggactgttgattaggtatgtgaaaacaagggtgggtggccatggggcgagtagtcatagctaaataagaacttgaatgaggaatgtaaacatagagttcagttgaagatagagataaacagaagtgacataagcaccccagagttcccagtttaaaactaagaaacatataaacaagctcctttctgctttaaccacaaaaaagcaacaaacaaaaagaaaaaacaacctgttcatttaaggcaaagaccacagtaccttaattcagaataggggaatttgattttggttcctacacgtcagagcatcagagagaaggacaggtgagcttgttcataaagtggagcaaggacagagtttgaaaagattaatacatgagctgtacttgccatggaaaaatttgcacaatttcagtgggatgaactaattggtgaaggctgttttaccatataaatactactaaagtagtatttacagaatgtactgtttcccattcctaggaaatctgccccttgctgatagggatgactatctaaagggaattattgctgtctaagtggagggaaacttgggagagcaatcagcctc

SEQ ID NO: 42 - protein, 274 aa, Bos taurus
MKKTQTWIITCIYLQLLLFNPLVHTQGICSNRVTDDVKDVTKLVANLPKDYMITLKYVPGMDVLPSHCWISEMVEQLSVSLTDLLDKFSNISEGLSNYCIIDKLVKIVDDLVECMEEHSSENVKKSSKSPEPRQFTPEKFFGIFNKSIDAFKDLEIVASKMSECVISSTSSPEKDSRVSVTKPFMLPPVAASSLRNDSSSSNRKASNSIEDSSLQWAAVALPAFFSLVIGFAFGAFYWKKKQPNLTRTVENRQINEEDNEISMLQEKEREFQEV

SEQ ID NO: 43 - DNA, 14228 bp, Mus musculus
ggggcgcgcagcccacgcctcagtgactcggcgaccctcagcacgctcgcttcgggactccgctgtctccgtggccgtgggctctctttccaccaccgcctcggcttttttttgcccgttggccggctaggcagccacctcacgtagctgccccgtcgcgtggcttctgctccaccttcgaggttttaccacccgaactctggccgccatcatggtgagtcgagggcaggccccggggtggcagtgcaagaccagccggaggccgcgattccttacgcggaggtttaaaaatcggccttttctggtgtagcacagagaagtggggagagggcataaagagggtcctttcatatttccggttctgggttcctcccccaccggacagcccccagggtgaggcctggaggacaagagtggcggccttgctgcctttgcggcctacaccagcactgaggggttgcggggagatggcgggcagccctggggacctcgggcagccccggggtgggccacgtgcacggcctgggcgtcacgtgacggctctttcccgcctttgggccgcggtgcccgtaggagcaggccttaggcgaggcctgccgcggcccagcccccaccccgcggcccagctcctccgcacgagcgcccgggcttccgggtcggagcgccgcagcgcgggcgcctccgccaggtggcgcctaggctggccgcgccgggtcctgcggcctggcggcttggccgcggcgtggaaaggacccggagggcgtggttatcgggaggctgagggcgggccctgtcgcctggtgactgtgggtggggtggaggcggctttgcgggagcttggcttgcgtgggctgggggaggagccagaggcctgagccgggcgggggtcggggaaagcgggaccggacagctctgctgtaatcgccgctgccgccgccagcagactgactgaggcgttgccaggctagcttgggctactgaaaacaaacgttgatagccatttaatcacaaatccgttagatgttgcatgttcgtttaaaatttttttccattttagaggtaaaggaagaaatttatactacttatgaccgatgttaacttaagttggaattcaaattaagcatttataatgtgaaataggtacttgtctatcacaataatttaaatcgcacaatattggaccgttttctcactacattagggttaaacatttgataactgcagatttttatctattggccagtatttgtagcatacatgggaatttgcttagcatagtgatttaattacatttcaaaaatgtgaatcctgaaatctttaataactattctcagcttctagctatatttgatatgtggattttccaatacaatgaagtatggtactgtacaaaataggcaaatttttgtgtgctggctcattgctggtattctaatatttctcatagctaattcagaggtataattaaatatgtcttaaatttaatacagtttgttttcagtatgctattatagtccattgatgagtaagatactttcccaccagggtcagtagtgggcatttaggtgtgtggaaatttacaattattggggacagcagggggccatatggagccctttagaagttcaggtcaactctggcaacataagacgtcatttaaaataaataattgtactcaagaagtagaggcatgagtttgaagccagcctggtctacatagcaagttttcaggacagccagagttacataataagatcctatctcttaagtataaaattatactttcttaaacatcaacctgacttacaagtatttggttgtagagtggttttggtcatatttaaaaagtaactaaagcatctatcagttgtgggtgttttacttattaagcatacagtaggaattaggtcttattaaaatggattctttgctttcttggttttgagtgccacctactggataaggactaggatatggtgtgccttctttaatacataatacactattattttgagaccgatttaatatttactctgatgaagcaggtagtttaagcccaaatcaagcatcctataatatttaatgctttattttcctccttattaaacttttctcaaacgtccattttacttttttataaagaatacaattagaagacatttgagattttttttttccttaatttttaaggcaggaaatcaagatcttgaacaatggaaagcaaattcttcccaacagttattttcctcttcagttctagaagtaccataacaggatttttcatcacatccctatacaggttatggtcctagtaacacattgtttgggaatcatttgttatggaaatatccctggcttcctaccagatgccagaaatttacctcactgttgacatccagaaatgttcctagacataagtacccctgcagtactgagagtcagtgcattataacttatattctggttaactggtaaaatattacacttctaagttgaaatgcatccatgtattgtggtacagacatcagtaaaaaggattatcgaataaaaatatatcctaaggtcatcaatacaagaagagtaaattgagaaatggagtcctaaaaaaattacagaactattgttttatgttttgagtttatttttgaataagaaattgagtagagatgggtagattttctattagtaaatcaaatctagtcaggttctaaatagtccaagatgcatagcatatgtagtattgcatttaggattaaacttaaatcgtaacatagtaaaagaaggaaaaatttaataattttgctgcctgccatttcattgtcatgaaatatcacaaaggggatttactgtttaaagaaataaggtagttctcaagtaggaatataaaatagcaaataaggacttaagcagataaaagcaaaaaaggtcaaaaaagtaaagtattggacagtttttcatttctaaaatttgtatgaagttaatcttttaaaaacaaattgacatttttagcttcttgacaatgtatacatacatgtaaacaagttacatatactagctttcccttagtgttcagtattcattgtcagtttcataagtggatttttcagtgggtatgacataataatagtttactaaaattccatccagttaataaagtcagccaagatagtaaaatttggagggaaaaacttttttaactccattgaaaataaatttaaatacaggatacttaactcttaatagcatactactttataaaacgagttcgccagttttagtcattctcaaagtaatctgccagagatgcactctggcaaacatgctgcttataacttacagacataaatctaggtattttgatttaagttcatttttttgtgctttgttatattgcctcttctgtacacacacttatttccaataagttcttctttaggaaaatcatgttaatcaattaagaatctactgtatgaattgccagtggagcttgtatggtgttagtcaagaaacaaaaagctatttcagaacatgctttaaacacaatagtattagggaataggaaactgatgtgtcagtaatttctcataattcatttacttctaaatgtgattgactaatcacattaacatgggcatgttaaggttatagaatttatattaatttaataatagaaaggcaaggaaaaatgtaagagtttaatacttttttttgtttggggtattgaacagctgtgttgtttactttgggttcttactatgcttttgatttaagacactcagtaaaatggaaatttagtagtagttccacaatggttttagtcttcacagatcagaacttttcaccaagttcatcaaataaaatcttttcataaactgtaaagttggcattttttcacaatatagtgtaaaaggtgacatgaatggggcagagagatgaatcagttgttaacagcacttttgctactcttatagaggacccttatgatagttcacagttgtaatttcagttccaggagatccagctccctctggcttctgtaggcactagcacacacatggtgcacatacatacaagcagacaaaaaacttacacatgttttaaaaatgtgttgtcttagtgttctgttgctgtgaaaagataccataaccatagtggggtttgctttcagtttcagaggtaacagtaagaaggatatttctgaaagtactacctttttaatttctatgccagttctctaattgctttaagtcctgaagctaaactacactattgctagctaatttaggtgaaatacaaacgaagtgttttacataatttgtcatgtttatatatacatgtgtgtgcatatatatattttaaattgtctattctccaaatttcagtctgccacaacttctgaggctccaaattcagctgtctccagggaggccagcactcagtcttcatcagcaaccacaagtcaaggatatgttttgccagaaggcaaaatcatgccaaacaccgtttttgttggaggaattgatgttagggtattgtattcatatttcattcaaactttaaatgaaattctgaagccacaatttcatgttggtgttggggtgggaagaggtgggaggagtgcttgagcccaggagtttcaagaggagcttgggcaacatagttgagaactagctcaataaatttaaatatttaaagtgttatggacattgggagctgatgtgtagacctaaaaggattttctgctccaaattttatgcaggtttggttttaatacatagaaattaaaaatacactcagcaaaatggaatagtttgcaaatactagggattgactttaacataatcaaatatcttttttacaattggaagttttgaatgcttaatttttactcttgaaatttaattcttttccatagatggatgaaaccgaaatcaggagtttctttgccagatatggctcagtaaaagaagtgaagataatcactgatcgaactggtgtgtcgaaggggtatgtaaacataggtgatgtaagctactgtttatagaactaagtatgccagagagatgccagacaagacttaaaatgagcatgcaaactactgaaattgttgcctttaataatttatggacaaaggaatttttttttaaaataagttcttttgctagtacttgtatttcagtattttctattttgcacaaatggattattaaatagttatttcttggcacattccacactatcttaaattgtagctgtcttgccttaagtaataaacattttttaatgaatgttaatattactacattctgacattactaagaaaacagcagtggtattatagaggatctgttctctgtgtttcagtatttttatcacaatatattgatctttcattatcattttctgttaatataggatttactatggttatgattttatatttcatttgtttttctagctatggatttgtctcattttataatgacgtggatgtgcagaagatagtagaagtaagtaacagtctttggtaaaactcttctttagcaatgctttcgtgttgagtaagtcctggatattcaatcttacataaaatacagagaaaataggcttcctttctgtttaagatcaaactgtaattttatgtaacttgtcagaacatgcttgcttggaggcctctagctttatcagattagaaaagggatttgatgcattgtgacactttggttaaagtaaggctgagcacaatagtgtttgccaaactcttggaaatgaaagattaaaattatcgtgtgttatttttagtcacagataaatttccatggtaaaaagctgaaactgggccctgcaatcaggaaacaaaatttatgtgagtaaaaccagaagttttcttgatgaatctgcctaggttttcagagaacgcaatgtaacttttgttctttgtacttttttaaaggtacttatcatgtgcagccacgtcctttgatttttaatcctcctcctccaccacagttccagagtgtttggagtagtccaaatgctgagacttacatgcagcctccaaccatgatgaatcctatcactcagtatgttcaggtaaaagctgcctgtatttttattcttatattcaatagtctttttaagctctgaaatttatgcacagttgggatgttaagtgataacacactccattctttattggaatacttcaagtattaggattttgttattactgtcattcttagcgctgtttatgctaagctgaaatcacttctctgtagtttataagccattatcctagaaccttggtagccacattaagatacataaaaaaatagagaaggactatttttcttttttgtaaaaaagtttttaaatttgaaaatgtttttaagtattagaaaacagttttgtaagttctcttagttgatgccttcccaaagcccatcacttaatctatgttgtacttgcagtgctttccaaatgcttcctcatgtaagttgttgacatctgggtttatttcggttctagaattgatagggtatttttaaaaaatatataaatcataatttgtctgaaattggttgacacttaaattttcatgcttgctatgcatattggtacattttactttttcaatttgagagacttttgccagaaaagaaaactagtaaaatcttatatatttatatgtgtggaatatagacagtatcttatcttacttttctggctgttagtatgacttagaagaaaatccctatttattcctaactgatacaaggtgtgcatgtgacctacttgcttttattcaataaatacaagtataggaaacactgatttatccttttttctagtttcagattgtaatccccttaacttttagaaattaaatacagaagaaaatcataaataccagaggaattttagagattatctgctaatgttgctgttaataataatactgtgcaaaagtgtttttataaagaaacaagatacactaatttaactccactactagaactagataatcaatgtacgatgacctcctaagggagttattggcttggaaaaaggcagacattaacattgtcttttcttcctgcctgcctaataggttatcatttgacaagaaatacttttttataaaaccagtcatttatttggcacctatatttctagttaaagtattgctactatatatgtgtatatataaaaagaaaaaatacgtatttttgttttattgtgaattgatttactttctcaaatatataattctttttttctgtgtactttattcttaggcatatcctccttatccaagttcaccagttcaggtcatcactggatatcagctgcctgtttataactaccaggtattttttcttttattgaaattttttttctcacacatcctgattatggtttccccttcttgtagtcctcccaaccccccacttccatcccattctcacctccttataaacaggtttctaaggtgtcttagtgctctattgctgtgaagaaacacaatggccacagcaattcttataaaagaaagcacttaattgggcttgcttacactactatgtaagggataataaaatcaaaacaaaaactaatgcatcagaattaaacaaaacaaatggaaggaaaaaagcccaagagaaggtacaaaaattagagattcattcacaaactcataaatctcataaaaatactaaattggaagccataatgtctgcctatgcatagaacctagtgcatgtttgtgcaggccccgtgtatgctgcatccatccctgtgaattcatgtgagctctgatcatgttgatttagaaggacttgttttcttggtgtcctccatcccctccaattcttacacactatctgcttcttcttccccagggttccctgagccctaaagggagggattttaattatcagataacttaggggaaagaaaaataatttgggatattagtatagtctgtatttatataaaattgccacatagtatcgatttaaaataaaaggaaagtagaagtaatctataattcaggcatcaatattattttgataaagaaaagttttgttcagactgtttacaaagattcagtattttttgttattatttcagcatgcattctttcactgctttcaaatacctgaaaaatccaggctgatttttataaatttttatagggtaggttaaaataaaaatattacccagttcttaagagcatccagagtctgatagtgtttaattgtgatggatgctgtgaaatagtagtcccataaatttcttccaatagatgtgaccatatttatgacccatggctatagctagtgataatttccaaaagccactgtcttattattttcctaaatgctaacttctgagaaaatgtgaggtttatatatagaagaaatgagaagtacacagatatcagaagcataaacgtatctacctttagttctgttttaaaagaaattgagtcagcacgagtactttcacattgtcttattgcctctttcatgaaaacgtgtgattaagtaatctttgtttccttttcttaagatgccaccgcagtggcctgctggagagcagaggagttatgttatacctccggtaaaatgaattagctgagcatactcttattagacttacagtgttttctttgccatattgtatacatttatattttaattgcattttatagtacatattttactttcttgttacctcgattacatacacacatgagagagaaactgcttttttttccacattatttttgtatgcccaggcttagtggctgcttcatgtatttggttacttgttggcatgatatataatccacaaaaagtagttttaatattagattcagaattagcattggttcttcctagaatctgcctctaactgtgctatttagagaaaatgtataggagcaagacaattttaccattaataatactttataaaaggaataaaggaagctactaactgtaaacaccaaagcttttgttaactttcatgaagattggatattttaaaaacaatcaagaaaattctcccatactctgttactgtatattatacttttcttagaatcctgattctgatagtgttggcagaggacatttaaaaataagacttacttttagcctttcagtttaaaatcgttttttaaatagcttaacattttgaaaaacagatgacttaaaatgtatggttctctttacttatactttttcatcattttaatataggcttatacaactgttaactaccactgcagtgaagttgatccaggagctgatattttgcccaatgaatgttcagttcatgatgctgctccagcttctggaaatggcccgcaaaaggcaaacatctaattttgtttactgatttttatatttttatttatgtttattactaatggttctttgataagtagatctgtttacccaaatttaaaaatgaaagtcaacctgcaatgcttaggaaacttattaactctgcaattaatgtacaaaataatgacactccaaactttgagtggttttgattcccttctcttatcttcttttttgattatgttttttcttatgtattgtcatttagtatgatttagcagaatccagtgaccaggtttctacaattagtgtgaatttatagtttttatttagctaaatagtaatacatatcatttgtggtattctacaacactggctttttaaaaatgattattttgtattgaacatattctcacttccaaattctaattcatatggttgaattaaggtgttgataggctgggaatgtgtataatggaaaatttcattggacacatttctcatctgtgttagtgaaaaacaaaaaaaaaaacaaaactactgaacaataaggtaatatatcacctgatttgatccacagttccacattcttaaaatttgaaaaataaggtggtatagtgatgtacaactttagagaggtagaaaaataagttcaaaatcagccttggctacatagcaaatttgaggcaagcccagggttacttaagtctgtttccaaaaaacgaatcagcttcacacatatacatacataaatacatacatacatacatacaatgtgtgaatgtagattaaagtagcttatacaattataacatttcattctgaatactttttttctttgaaacattaaagctgacttctgtaatagaataaattcagctttttaaaaaaccagtgttcttaggagaaataataaaaaaatcacaagagttcaacattatgaaagaatttcctaaaaatagtgggatatgcttagcatactttcaaaaagtcatttgcagttaataaaattattgtctttaaattttaaatttgtagaagtctgtggaccgaagcatacagacagtggtctcttgtctgtttaaccctgagaacagactgagaaactctcttgttactcaagatgactacttcaaggtaggaaaagaatagtatgtatagtaaagggggggcgtgttaacattgaaaaattactttttcctatagtgtacatattttctaaaccagttgtttgaagtgtttattataatcatggtgatttgagttttacccagtaatgtgtttgatgtgatgtaaatcttaaagtaaataatttgtctttagggaaaaaaaaaaaaaaaaaaacttgagaagttaaacgggtcataagccattgggcacatggcttagtgaataaagcacttactgagcaaatgtgaatttgaacatagaatcacataaatgtcaggtgggtttagtacccttagaattccagtcttcaggaggcaaagacaggatcctaagcaaactatgtagccatatcagtaatctctgggtgcaatgaaaaaaggtagaaagcaatcagaaagactccagatgttgacctcaggcctacacaagtaatataaagggtttgtgagagttgacagataagaaaataataacttttgaccacatggtaaaagagaaatttgaaaacagaatgtaatttatagttcttggactaaagagaacaaaagaactgcttggttaacatattttgagcattgaatctagagctcatccatttggctaggctgactgacctatgtgctatagcaatttgcctgtctctgcctcactcctgaggactatgacatagtatacctcaattacctcaattttatagagcactagggatctgaatcatgtcttcatgcttgcacaccaggtaatttaccgatgagtctcttctagccacataaaaatcactctttcatatacaacagaatctggtccacaggaaaagggcctgattaagctagttgtgtagaaaagaatattatattttattaaccccatttccctttttaaggattcattttcctataactacatctcagtaaataatagtgtaaaagaaaataatttgtctatatcagacttctgtctgtgtctatgaatctttaatccttgaatttacctgattatatgtagatattttaaattgtaattcccctcaaagtagtaaaaattttcatgttaggtagtaatatgagaaagatttaaagtatgcagaaagctcttcaatgtatatgcaaacacattttatataagatttgggcaaccctctaaggttatatccatgggggagaggattcctagaaccagtcctcttgagaaaacattttcaattttcttaacctttacttcatatggaatgaaatatctttataggttaaagatgagccttaaatatacaagatttagtttttaatcaaaaataaggatttcagattaaaataggatactgttctcagtatggtttctgtcagatgaagttgttaatcaagacaatactagagatttttgttgtgtgaagagggttttggtgtgttctcatgcctcccctctcagtatgtactgatccttatttgtgtgtatgtctgcattacctatgtgtctgatgcccacaggcaccagatgaggatgttaatagtttctgagctaaaccgtgggtgctggaaatccagcccatattctctgtgagaataagtgttcttagccaccagagggattccttattaggttcatcatttaatagaccctaaccagttggtgcatttattgttgcagagttctacaagattatctcctcttcctcatttattatatttaaagttaaaacaacacattggttgtctcataatcctaggccagttgtggtaatatggaattttcaatgatttaaaatgactgtttctgtcttttctaggataaaagagtacatcacttcagaagaagtcgggcagtgcttaaatctgatcatctctgctaactcatctcagggggttgttggttttgaatattaaaagaaactgaaaagttttcaatactatagaaaatttgacaaatcactcagactttctataaaagttatattagattgcatagttttatgttaaacttgttagatgtttatatagaaactggttttgtgttcatcatatagttgaaagaaaagataattgcaagtaaaaaaaaaagataaaaaataattttcaaataattgaaaaatagttgaaaggaataacttttaagatttaccgtaaggacttttagttgaaattggcattttaagagttcaaaaacaagtactaattttcaagaaaagaattttataaacctattttgaaaggtcaggattttgatagtttgactataagaatttcacttctcaacaggtacctgaacagtacaatattaacgatattgtactttatatttattatttgtctaaacatttgccacaaaagcagaatttttagaactgcatttttaatcaatggaactcaatatatagttagctttattgaagtcttccttatctaaacccaggaaaacagattctcaacagtccaatcagtgggtcttaacatttatacaaaatattttaccctttatctagaatccacacatatacatatatcctatttatttggttgggatggtaattaggatatctaaaattctaggtataattttgtttaaagaatccaagacaaactaaatttcactaggtgtataagctattcttagtgagttaatactctttttttttttttcttaaaatgctaaactcaatggctgtcttaaaattgtgcaaaatactggtattaaagagtgctgaaaattttttatgtcacttaaaagttaatcagagtatctgaaaaattgtttttataaaaacattcaaaatattagttgttacagagtaaatacatttttagttttgttagtctattgtatttccctttgtaaagtaaaatatgtccaaaacagtcaaagtaggcaatttgacatttctaaaccacaaaatgtgtttcataaatgtatcccaagaatgtgctaaagtgaatctgtttttagactagatggacatgagatcattggacattatgcattgtgacagcagagaacctttgtacccacagtcttttgcagtcttaatcctattctgtcaggattgctccctggtataaagtagacaagtaacagttaacaagcagctcaggggctaagccttaggaatatagcactggaacagcaccttgctacctaaaacaattggctgaacatcaatctgacctgccagggacatgagttttaaaatgccttgttgatctatcttgtattagtcctttccttcaaacatggattccacttactcttacttagtggaactaatgggtcatatcacaactgtccctaatgatctttaactcttaatcttattctgcatctaaagtcaaaattcttttatgtcaccaagtcagtatataccagaaaactaagaagtgtcctgaaatttaattctttttagattttgtccccttacttcagtgtatttgtagtgtatgtccttacatgtaccattctgtgactaaatatccaacttactatgaatgataacctaaattctgaggcacaaatgtaattgttgctgtatgactttaaagaaaagtaagggaataaacttttgtctgctgttttgttggagtcaagtatttaagagaagggagaaagagacaagtactgagcctttcaaaatggaagattaattttaaacttaaaagtatgttcctattacctatttccttgtatacacgaataaaacctttttttcaaaagcat

SEQ ID NO: 44 - protein, 298 aa, Mus musculus
MSATTSEAPNSAVSREASTQSSSATTSQGYVLPEGKIMPNTVFVGGIDVRMDETEIRSFFARYGSVKEVKIITDRTGVSKGYGFVSFYNDVDVQKIVESQINFHGKKLKLGPAIRKQNLCTYHVQPRPLIFNPPPPPQFQSVWSSPNAETYMQPPTMMNPITQYVQAYPPYPSSPVQVITGYQLPVYNYQMPPQWPAGEQRSYVIPPAYTTVNYHCSEVDPGADILPNECSVHDAAPASGNGPQKKSVDRSIQTVVSCLFNPENRLRNSLVTQDDYFKDKRVHHFRRSRAVLKSDHLC

SEQ ID NO: 45 - DNA, 20953 bp, Sus scrofa
tatttgtgaccagttggccaccattttgccagctcacaaagtaatcctcagtacaaaagtgaagtttgaggataagttacagccagttattctctgtggatataaggttctggagtggtttccaaagttgtgtgatttgctctgcaaactgccccatagctcgcccttgctctaggccctgtttctctgatcttgagaatgttctagaattctctaggcaggcctaacttcttcctttaaggtcaggaagaaaaatccccccccttcacaatttgaacacccccagcaaaggaacgtttgggtattttattcactcctacattttgggtgcctggcaattgttgatctcaataacttgtttctggaaagaacaaacgtcttgaatgccaagcgggcctgcctacctgatgtttccaatccaaccccatctccctcacacttgaaagaaagtcatccaagtttctggacttttgatgtctccctccctgttcttcatatatgtctttctgttttctatttctgttgccatttaaattgatttgggggctgatgatagggataatcgccattgggctattcctgggcctttgggacgccattttgaaactagagcctggacacattcaaattttgtttttaattttaacacatatttgagtgtgcagacttatttcaggtgtgcttctaaggcactttcgggactttctgtatatctgtgggtccgtcggcacgcccttcgggaagtggcgcctctaaggggtatgctgtcggcccgcgcgcaccccttgcgcacccctggctggcgccgccgtgccccgcgagccccctctgaggggggcgggggcgcggccgcccattggctgaggcacctcggacgagcccccccacaccccgcgcaggagccacctccgggcgccctgctcgccgcgcctcagtccgccagcacccctcagcctcgccagctgcctgcgggtcgctttgcttatccgcttctgcttcctctgcccactcgaagccggacaacaggcaccagcaggcctacagcagccccgagcacggtgctgaagccagcctctgctcctccagtccctcggtgggaacactggctgtcgcagtaatggtgagtggaggaggcccgaggcggtctgggggcggcctggggggcgcagcccgaggagagggtgagagctgggccgcctctgctttgctctcctgggacgccagcctgaggtgggtggggagggaggccgcggtccagcggccgaataccggtctcggcctacagggccctgagggcggcagagaggcgggaggcctggctgtcgagaggctgggagtgcccggcccgccaagcacgtgcacagcggccgccttcccaccacctccgccagccccgaccgggttggggggagcaccgggccatccggtgaggggactggggggcggggaccctgctcccgccccacccccaccccaccccggaagtccctttcccgcgcttactctgagtagaaaatcctgaggagacgagcggcgcggcgtccgcgagatggcgtcaggcccgcgcgaacgaatgccggctggcgtggcctctgaggtgcacgcgcttgcggaccccgaccacgggccgggagccgactcgggaggtggggttggggctgggtttggtgaggactgtggggggtgtcggagaggagtcggggcgggacgggactagggccgactgaggccggcaagtgtcacccaaacgaagcctgcagtggccctgtgacgcccttgtgaggcagcggcgaccttgggcggaagctagctcgccgccattgcttctgcacgacgtcagcgcggcttttgccgctgggcggccgcagattggggaaacggaggaattcttggctcagggaatacgtttccccttaaaaaaaaacccaggaacttgcaacaccttgtctattagagtattacacgtgacattcatgtgaattttctaaatgcagacagttgattgaccacctcaaggtacaacaacgctgagcacttttgaccaaccatcaagtcccaaatgtgttatatactaggtgtagtttacagtataataactattagtctttcagtttttggagataaagggaggaaatttatgtaccatttatattggcacaaattttaaaataaaattttattgcatgtaactacttgtaacatttttgtgtcatgtagttacccatgtcagtaattacttaataattactctgagttactataatcatttacaattttgtcctccccatttttagaggaaaagaggggaaatgttaatagctttgttgatttttattctggtataaaagtagcatattaactcattgggaagttatcaatgtagaaagtagagtccatcttaatcgcaacatctaaccaccgttgaagtttttacgtatgtgtgcccttccaaattattttcatgcatgtgttgcatctagacaggtacattttattttattaaaattgtaccatgctgtattatactattttacaacctgcgtccttcacttaatatactgggccttattccaaagagaaatttaaaacgatttcaaatacataatgttagaatataggattgttccattactcatttagccaaattctggtatatgaattatttttctatattaaaacaatattatattgagttattgcgtatctttgtgcagatgttttgttatgcttattctgttagtaacttgaaatgccacgagtagaatcactgggtgaaaatgttatgcccattttataacaactatgaattatgatacatctttcctacttactcttcataaagcatgtaccagtatatattctcactgatggtgtgtaatgtgacctcctctctccactctttccaatgaaaggcattatactttataaaattgccaatctaataactggaaaatatttcacagtgttgatatgctttttttattttaattattactgaatttgaagcttgtaattagctttttacatttctttgtaataaattcttagtccatctttctatttggatatttttcttatgatttataagaactctgttactatatttgtcatatatgtattatttatagaaaaaacttatagtggttatgaggaaaaaccgttagtcctaatttcagtggaaatcattatcatgtttcactttaagcttgatgataacttagaattagattgatagaaaataagattcttttacttaggtttttaaaaattaagaaatgaatactgtatttgtcaaatgctttttcagtggtgaatcgcagtaacagatttcctaagaatgaaccatccttgaattcccaatataaactgttcttaattgtatgtttttttgtatactgctagaattttgcgtctctatgttggaggcatgggtggatcatcttaagcaggttttgttatttagatggtgttagtttatttgtctttcctctttactctgaaaattttttaagaaaagtatttgactttcactttcaattccctcccctagctaccattgtttttgtctagattcaccccttccctccccacacacaaattatctgtttctttacagtttgagaaaactcccaatgaaactgaaccaggaatcgaatgttctttcttttcttaagattgtttcttaaaatttacttttctctagaaagttagttatatcatcaagatttccaaagttactatagagcattttcttatctccattactcatatcactcctccttttttttatgactgtgcctgcagcatatggaagttcctgggctaggggtttaattggagctgcagctgaggccttggccacagccacagcaacaccaggtgcaagctgcatctgcagcgtatgccacagcttatggcagcaccagatccttaacccactgagcaacataggatccttaacccagggatcaaacccatgtcctcacaaagaccacagtgtgacctgctgagtcaaattagaactcctcccatttttcattaatgtgtgtttttgtattcttgctctttttcttagttttctcagtattgttatttttgttgttgtttgtgtttccccccaagaatccactcttgatttaaaagattttgtttggattttcatttactatttctttaataggatttccttttctctttagtggctacttccttctgtgcatataatgctgataactgtaaattacggacctatatcctggtcaatttacatagatttcagtttgcttatatgcagacataatagttgaatgaaatgtcaaagagctgatatccagacactttggtaatgatgtttttgttcagcttttaatctttgtcatttgcttatccaaatgtagcggggactatattactataaacagcagtgatgagagttgtgtatatgatggcctgcaagttcactcctacttatcccagaactacttatttcagaacccttcaacgcacttgaaagtgtaattaaggaaaataattacttctttcatttaatttacatgtaatttattttctacatgctattgatagttaaagttaatattttaacaccaaactttttgctttaccctgagaattcatttgtgcagtatctttgcaatagtttaaaagtaactgaagattatgtgttgattgtggatttgtatatatcagttataattgtatataaatatacaaacaggtgaagtttaaaaatccctgttttaaggcttcttaaaatggagtactttgtttactttagctttgggtgccatctgctggctaagaaccaggacgtagcaacaccttccttaatttaagatgttatgacaatagtgaagtgatttgattaattttatgcttaattcttcaattaagcagtcagttcatacaacccaacccaaaaccaagatttccgtaatatgtaatggctttttttcttttcctcaaattactatttagttggctcaaatatccattttacttttgtaagtagaatgggagaattagaacttttcaattctggcaacactgtcacagaatgtctcaaccatgaccttatgcaaatttggggccagataattctttattgtggagggctgtcctttgcattataggatatttactatatccctggcctctaccaaccagataccaggtacacccctcagttgtgacaaccaaaaatgcttctgagcaaccaaatctcccctgactgagaatcaatatattatcatataatctggcacacttttgtggcctgatattacacttctaaattaaactacacctattcacctatctgttgtagttcacaggcgggtaataataaaaatagtttatcaaataaaatatccagagtttatccacagatgaaggggaaattgagaaagggaaaagaaagtatacaagaatttcaaaaccactattttgtgttttgaggtttttggtgtgtctttttttttttttttttttttttgccacacctgtggcacatggaagttcccaggccagggatcaaatctacaccacatcagtgatcctagccacagcagtgaaaacactgtatccttcaacctagtgcaccacaagggagctcttgttttgggtttttgaatgagagctaatatgaaagggactggtaaattgtctatcatgaagagaaatctggtcaagttcttgataattcaagatgtgtgacctacataatatagttccatttagaaaaaaattacaattacaaaatatttaaaaatgaaaaagctttagaaatagttttttactctttacttcattgtcatgaaatatcactgtaccatagttaaaggaaagaattagaaatattcagatagaaacacaaaatggcaagtatgaacacaaaataatagagaaaagcccaaacactcaaatatggcaatttaacaattattatttcacctctaattggtatagcatttgtggaatcttgatttattagtaatttctagcatctaacaaaatggaactctgcctacttttcattcgttattaatttctataaaaattattttgcttggagctcccattgtggcatagcagaaacaaatctgattaggaaccatgaggttgcgggttcaatccctggcctcgctcagtgagttaaggatctgccattgctgtggctgtggtgtaggccagcagctgctgcagctctgattgacccctagcctgggaacctccatatgccacaggtgcaggcctaaaataaataaaaaaaaatattaaaataaaaaaaattatcttgctaatcttcttaaaaatatacatcacttggtttcctttgcccttgtttttgttttccttcataagcttaggtgttaacagttttatctctcttttgcagccttttgtacttattatttataatcaataggtacttcataaatgaatttcaaatgaacagatgtggcataaaataatttcttgaagttccagtttaaattactcgttaattattaaagtataaaataagtacttaaatcataaaactaggaaagagactttttttaaacctattgaaaataaattcaggtaagagtacactaacttatattggcataccactttatactttacagaatgaattcacagatgttattacacttcattctcaaagcaattttccaagagataaacagctgccaagtagatggctgtaacctagtaagggacatgaactcctgatggtatcagtttttacatctcctgactaaatcaattttttttcccaacatgcatattaccagtaaattctgactgagaaaaatcaactttaatcttcgtgtgggaagcctaaagacagttctaaccagaattcagaaagataatgagtttcatgtgtaggtctatatctgaaaataaagatggtatcatttttatctattagcctactgtgaaaattagaattatcattatcggtagatcttatctgttattattcaagaagaaaaacattaatttaaagattctttgagcaccctagcagtagggaaaaggattataacactccccttcctttaaagcaggagctatgatacatgaacaaataatggttttcatggtccgattccagagtaaaacaggcataccaaggcagggagtattctaatgataaaattcatgttaattttggtaactagagatgagacaaaacaaatgggttaaaactttcttgtatgtttttgatgctacttttaaaaaaaactggtatctttaccatgcttttgcataaggtactcagaaaaattaaaatttgcttattgacatagaacaggatggactttagtaactttacttttttcaaatctgaactttctatttattttttgccggtttatatagtgttttccaaactcaatatgaaatctgtatcctaccgcagcattgtatagagatggtgatgagcatcactaggtttgagaaagtactatacttttttattaaaatgttatgctgatatactctgattaccctatattcttagcctgaactaagctatattttgattaatttacaatggaagtaatttatgtggaaacattttgtattttaaaaatgtaaattatatttcacatcatctatgcttttagcctgattatctagtgatgatctctgctttccaaattacagtctgctgcaaatcctgagactccaaactcaactatctccagagaggccagcacccagtcttcatcagctgcaaccagccaaggctatgttttaccagaaggcaaaatcatgccaaacaccatttttgttggtggaattgatgttagggtattgtattcatgctttatttatttttaagagtattttgtaaatagtggaatttgggccctgttgaaaacctaaggcttttttttttttttttaactttttgcaagtttggttttatgtttaacctaaacttatctttgacaaatcaccataggtagtttggggacacttgggggagatacttccataccttcaaacattctttaaagtataattgaaaattttgaatattgaatttttactcttgaagttaattcttctccatagatggatgaaaccgaaattagaagtttctttgctagatatggttcagtaaaagaagtgaagataatcacagatcgaactggtgtgtccaaagggtgagtaaaatgtgtatgttcaatataaattatagtaaatatctgtattatagcatctgtagagtttcagaaaaaaaattcaaaactagtattcttatatttgtataaatgaagcttgttgctttgtaatttctttcatgtggaagacaaaagtttgctgccagctcttatttaatcaactacctagtgtttgtattttggggggtttttggatttttaatcctagtgtttgtattattattattattttttttttttttgtctctttgtcttttctagggctgcacccgtggcacatggaggttcccagctaggggtggaatcagagctgtggccactggcctgtgccagagccatagcaacatgggatctgagccgcatctgtgatcacaccacagctcacggcaatgctggatccttaacccactgagcaagggcagggatcgaacccacaacctaatgtttaccagttggattcgtcaaccactgtgccacgatgggaactccctagtgtttgtatttaaatgtttcccatcttcatttattttacctaagcggattgacccagttttatcaaagaatgttttcctcacacatttcacagtatctttaattttaaccatcttgccatagataaaaattaaatttataggtatgaattttttcttaatgaatgaggttcccacgcacattaatctttgtgcattctaatgtagagcagggtaagaaagcggaagccgtggtgttcatagaggagctgtcatgtacattttacagttatttatcttggtatatttttcgtccttcactgttattctgtcagttatttcatagaatactagaggttttaaaccatgtactgttatggtgattttatacttcatttatctgtctttctagctatggatttgtttcattttataatgacgtggatgtgcagaagatagtagaagtaagtaatcttcctatgggggaaaaaatctcttaattcccttatgggtgcagtgttttgtattatttgtatcctgaatatatactcagtcttgttaaaacatgtagaaataaatatacttcctgtttgaaatccaaacttagaacaatcttatatccaacttcatgaactagagacaggaaagattagagacagtgttaagggtttttgctttgttttgtttttgtctctttgtctttttggcattttagggccgtacccaaggcatatggaggttcccaggctagggatctaatcagaactatagctgccagcctagcccacagctacagcaatgccagacccgagccacatctgcaacctataccacagttcacagcaacactgaatccttaacccactgagcaaggccagggattgaacctgcaatttcatggttcttagtcagattcgtttccgctgtgccacgatgagaactccgtgttaaggtttttgatcaaattctacacgcctctcatttgattggagtagcaaggttaaataaggtagcttcatgctgataaattttgatttggtatactcttaccactgatcttctctggtagtaggaattttggaggatttgggtatttaaccaaagtcttggaagtaaagacttggatattgactctagttttgttcctgttttattttcagtcacaaataaatttccatggtaaaaagctgaaactgggccctgcaatcaggaaacaaaatttgtgtgagtaaaggaaggaattgttcttactgacatatgtgtggcttttcagagaaataaaaatagactgtcttcttttattctttgaaaaggtgcctatcatgtgcagccacgtcctttggtttttaatcctcctcctccaccacagtttcagagtgtctggagtaatccaaacactgaagcttacatgcagcctccaaccatgatgaatcctataactcagtatgttcaggtaagaatttatgtacattcctttttttttttttctttctttcttttttgtcatatagtgtttcagatcttattatatagctgggggtgccttaaaatcaagccagtctcacttcctaccttcggtggaattacatccacaattcctataataaatggtagttctatccctgtttgaatacttttgagtaatgagaaatctatgacttttgttagaagtctgtcatttttactgtcacttcttaaactaaaatcttcttccatatggtttgtaggcctttatcttagaactgacctctgtggccacatagagcatgtttctgcccccctccttcccatataattcctaaaaaatgtgaaggcagctctcctcatgcttttgcatagtttattctctagggtcagctattctttatttgcagtgatttccagatgcctcctcatacaggttgttgatttctggaggtgctctgcttccaaacggatacatttctaatgacttcactatatttgtaaatactatttgtttctggaatataatttgtcttggctactttaatatttgaagtttgatttgaaatacttctgttgataactaacatttattttcttcttagttcaatttactttcttcactttagaagacattttatttttaggagtagaagcctagtaatagtgaaatagttgtgcagtgtctctcatttgtttttattttccatctacctgaagtgtagggtatttccttccttatttttcttaactctctaccatctagggagttccactggtggcacagtgacttaatgatctggcttgtctccatagcattgccaatttaatccccagccagtgcagtagatgaaggatctggcattgctgcagctgtggtgtaggtcgcagctctggcctgacccctgctccaagaacttctgtatgctatgggtgcagccaacaaagaagaaaaaaaaaaaaagacacagctagaagaaaaactatctagatagtttcagttaataaatatctattgaaagatgtaagacattgtactctctcttttccagtttgggttatatactgcccttaacttttagaagtgaaatacagaaagagccataaagtctgtagaagattcattaccccataatactgtcagagaaatacaaacctacctgaaagtatttttacaaaaaaatagcacacgtgtattaaaataactttaacctgtggggtttctgtcatgactcagcagaaacgaacctgactagtatccatgaagaggagggtttgatccctggtttcactcagagggttaaggatcttgtgttgccatgagctgcagtgtaggttgcagatgcagctcaaatctggcattgttgtggccatggtataggccagcagctgtagctccaatttaacccctagtctgggagcttccatatgctgcaggtgtggccctaagaaaaatgtaataacttttaacatctattctaatagagctttatcaccatgtaaaaataacttgtgggtggaaataaacaactaaaacaaacataggctggcaaaatctgtcacttcccttatttatatctcctcctctcagcccaaaaggctgacatttgactgagaacgctctttgtaaaactagtcactctcatagaattctgcatcatataaaaaaattaagatttccttaattttgttacgctaggaagaatgttcttcttctctggtttttaaaaatgtaccttggttaaatcattctttctgtgaactttatttttaggcttatcctccttacccaagttcaccagttcaggttatcactggttatcagctgcctgtgtacaattatcaggtaatttaagagggatcaaaatgatttactctggaatattattgaggcttttatttatataaatctccataaccgtttgtcatctaaagtagctgaatatgcctaagtttcaagaaaaaacttagaattagtctagaattaggacttctatattatttaaaaataagggatttctccatcaatttaaaatttttgacaggaatgagtttagcaagttttctcttgtattgtcttacaagatttggtgtctccgtctatatttcaacatatgttcttccatctttgctgttgaatagccgaaacatccaagctgacttctacaaggttttttagggatgtaggttgaaacaaaatgatgactcagttcttagagcattgaattccagttatatttgatagtgttttattttagctggttgctctaagatggtagttctctgaacttctgtccatatatatgaccatatctatgaccctagtcaaatctatggcaataaattcaaagaactctcttgagttttcctgaaaacaaactccagaacattgagaaaaagatggaatttaagtatatgaaagtaataaaattctaaggttttggaaacataaagttacttttcccttccattttgtttcttttattataagaagctcaaggaaccagcacgacaaatacctcaacattatctgtcatatctttgtgaaaatatgaaggaatatttaaataattgttattttctccttttttattactcaaatgaatttatcacatctgtagttacataatgatcataacaatccaatttcacaggattttttttttttttaagatgccgccacagtggcctgctggggaacaaaggagttatgttattcctccggtaaggtcaattagccaagcatgtacttcctattctttaaaggattttactcgttaactatcttatatttttttttaccttttgctgtatcaagtatgcttggaaatgttttaaatgcccttttacattatgtgttatgtcttatttcttgtcaacccaagtatatactcccatgggaggaactgtgctttttgtttattggattgttttttttgtgtacttaagcagtggctgctctgcatacagcaagtgctctgttacttgttgatagcatgtgtaaccaagaaaggtggtattaatacctatgctaattcaattccaaggatttagaattagtgttgaatctgtctctggttttctacctataaaaaactgttgaagaaaagcaaaaatgttttgctgtcaataccgttatataagaaaaggaataaaacaaaagaaggtgctacctctaaaacacctgagcatttgttggccttctgtctttcatctgggttgaatatttgaaggatgtaatgcgaggtaaaattttcaggcactgggaaattcccctcccattcccttactacatgttggagtttctttatcttagagaaattctccttctaattataattttgttgacattttgaaataaacattgacttatcacatttaaacgactcagtttaaaataaagtttctgaaataatgtattgaacttcagtacaacccagatttaaacttttagtgtcagctcaccgttttaaggaatagattgtttagaaatgtatctaatgtacatctttttaattacacttttgtcattttaaatgcaggcttatacagctgttaactaccactgtaatgaagttgatccaggagctgaagttttgcagagtgaatgctcagttcatgaagctgctccatcctctggaaatggcccacaaaaggcagacatttaatttttatttttttttcaagttttaataatggcccttgaagaagcaagcatctttactcaaatttagatacgttataggacctcctattgtggctcagtggttaacaaacctgactagcatccatgaggatgtgggttcgattcctgtccttgctcaatgggttaaggatctggcgttgctgtgagctgtggtgtaggtcacagatgctgctcagatccagctttgctgtggctatggtataggatggcagctacagatccaatttgacctctagcctgggaacctccatatgctgtgggtacggccacaaaaagacaaataaatacaaggagttcctgttgtggctcagtggtaacaaacctgactagtatccatgaggatgcgggttagatccctggccttgctcagtggattaagggtctgttattgccatgagctatggtgtaggttgcagacatggctccgatcccacattgctgtggttgtggtataggctggcagctgtaactgatttaacccctggcctgggatcttccatgtgctgtgggtgcagccctaaaaagacaaaaaataaataaatagatatgttacagagcttgagtcagtaggctaataactttgcaatttatgtagaagttaatgaaattttaggcacccccaaactttcagtgtatgtaatgtatatagttgctaattcagcagtcctttcctctcttccattttcattgttttttaaaagcgtacttagtaaatattgtagtaactgctttggcagaatgcagtgggtaggtttcctcaagaatcccactcttagggagttcctgttgtggcacagtggaaacaaatccgactaggaaacatgcagttgcaggtttgatccctagcctctctcagcaggttaaggatccatcattgccgtgagctgtggtgtaggttgcagatgcggctaggatctggtgtggctgtggctgtggcgtaggccggcagctacagctccgatgagacccctagcctgggaacatccatattccgatggtgcaaaaaagagaatcccactcttggaggaattcatatcggagttcccatttcggctcagctagttaagaacccatctggtatccatgaggatgcaagttcattccctggctgctcagtggttaaggatccagcgttgccatgagctgcggtgtagtttgcaagtgtggctcaggaactgcgctgctgtggctgtggctctggtactggtcgcagctccaattcgacccctagcctgggaacttccatatgccaaaggtgcagtcctaagaacaaaaaaggagggattagtatgaattatatccacctttcttttaccactgtaaatgtttccttagctaaatagtaacacaattatttgtgttacactctccacataccataagcatgagcagctcccaagaatggtgtaatcactagtagtaatgaaaatattggaataggtagggttgtttcttttttactattagagcagatccctctaataacaatgctctcactcttgaattctcttatttttttgaatgagtgggaatgtggaagtaattgatgttactggatcatgtataacattgaagaattcccattggagtgtgtgtacttcattcatgtgtttccagtggggaaaaaatgttgtaaactacttaattgtgaggtgaaaaaaatgccctgatttgttatacaacttaaactttgaaaaaaaaatgaaatagattttaatctaaatgttgaaatgttcaagttcattgtttcttatctaacaggaaaaattaaagagccttaagcaaatatcttagattttgagtaattgtactttttaactagtgctctatcactgaagttctaaaataattcttaaatttggtagaaaagttatttactaagtgatatgtgataagaattataaaattacatgaaaattctttagaaataagtatatgtattcattaaagttttccaaaaagcttaacagtgggtaaaaggaggaatagtctttagtgaaaacttctgtgtttcagaaatctgtggaccgaagcatacagacagtggtatcttgtctgtttaatccagagaacagactgagaaactcccttgttactcaagatgactacttcaaggtatgaaagtaatatatacaggctaaaaagcatgattgtcaactatgaaatatctttttttctgtggtgtatgtattttgagaaaatatagagcatttaattgagctttggcacttgactataacccagtaaaccagtgtgagtgaattttatgtggcagtatattctagctacttaaatcttggtgtagtgttgtttgtccttagggaagaaatcctcaacaaaagcatataattgaaagggttcatgaaagaattgaaagagaaaattggcttaataaccaaatagaaaattttagatacaagaagcagaacttaacattaagagtatgtggatattggactaaagaaattgatcactgagatgatgtacctgaacagtgttgggggagaagaggtaaagtagtaaaaagagcttagtagaaagaaatgtacattgattcagagttggtgaagtggaagagaatgtgggtttgaatttaagaaagttctattttctgatcctggttttatcaccttggacaaatcacttaaatcttaaggttccagtttttacaagtctaaaatgaggaatctctaagctccctttagttctgaatctctgaatgtggaaaggaactggtcacttcaatgaggtaagagtaatgtgcttggtaaagggaagttttagttttttaataaaggtttattgagatacaattcacataacacacaactggcctatttaaagtgtgcagttctcaatacctgtgcaatcagaaccacaatcaattttagaatattttaatcaccccccaaataaacaccctacccattagtagtcactctttatccccaccaactcttctagctttagacaaccactgacctacttttctttaaggatttgcctgttctggatatttcatatgaatagtataatacagtatgcaaccttttgtgactaacttctttcacttagcaaaatattttcaaagttcgtcaatgctacagcgtgtaccagtgtttcatttctcttttatgtatggatctaccacttgtgtttatctgttcatcatttatttgatagacatttgggttgtttccactttggggctctgatgaataatgtgaacattcgtgtacaagttattgagtagacgtatgtttttatttctcttgggtatacatctaagaatggaattgctgagtcatacagtaactatgtctaacctcttaaggagctgccagaatttttccaaaatgcacaattttccatgcaaagggcagttttaaactgtcgctttgtatcctaaaacagggaaaagaggtcagggaaatatagctgttattttgcaataactttaaagggagtatattctataaaaatactgaaactgtgctgtacacctgaaactaatgctgtaagttaaatatatttcaataaaaaaattttacccccccaaaaaaaacagtgaaaagaaaatagcgttttttcagtctatgactggacatgggataaagcttaaagcgtttttaaaaggaaggctaaggacttcctgtaacgtagaagactagaactgtagcagaattaagttcttaactatcttttcaacagagtaaacgtattcatttaaagttgacatttattctatggttacttcattatatatggacagtacaatttaaaaggaaagaactgggggttgtatgattgcttactttgcccaaaaaaggctaaataggtagtacttaaataatttgtttgcaaaacaggaaatctttaagcagcaagtctttaaacttgagttctcatctggtattaaacaaaaaagtctccctttgaaccttccaaagttttctgctcctctgggctaggagttagaagttatcatcttctagattgattttgattatatgttgttttttaattgaatttgaatgcattgaggcagaatatgcactgtttccatggtaaattctactcttaattctaactccgtaatctttcatatcctgcctaatctctgaggatacttgagtttgtgaccacttttctgggctttaacctaaatagaatatcaccctgttggtacactacgtaatttccagaaatcacccttctttatatgacaactgaatttaatccctgggaaaaggacacagttaagctaaaaaaatttattttttaatttttttgctttttagggctgcaggtacaccacatggaagttctcaggttaggggtggaatgggagctgtagctgccagcctatactggggccacagtaatgccagatccaagccgcacctgtgacctacaccacagctcacagcagtgccggagacttagcccactaagtgaggccagggattgaaccggcatcctcatggatactagtcaggttcattacctctgagccgcaaggagaactctgaaaatactattattatgttattatgttattatttctggtttattcagctccattcctctttgtaaagtctcgcttctgtagacaacataaagtgaaaggaagttttcgcatgtatttttgtatttttttatttcctaaaaaaatgatgtatcttcattacaggttaaggataggcctttaaatataccaaaacctagcttttaacctacacataggatttcagattgaagcggagtgctattctcaacccatgtacttcttttagtaaaaataggacatttaacaattttgtgtttcaccaggtgtctttgggacatcactgccaaatcattaattaagaatctacataaaaggttattgattctaagtccttttttctgagttactgagatttcttttttaactcaattattatgaataaaactagacattggtacgtttgttatcccaaagtttaggagtgtttccccaaaattatgacttttttctcattatttatagtttttaaaccccaaataaatgctttaagtatttagcagttttcttaagtcatagtgataataggaaatttttaatgaagtaaaaaaggactgtttctgttttttccaggataaaagagttcatcactttagaagaagtcgagcagtgcttaagtctgtttgatcctctctcctaactttctagtcccatgggaaattgcaggttttgagtaatgagaagggactgaaagtttttccactcttatagaaatttaaatctgaattttgataaatcacactcagactttctatacaagttagattacctagttttattttacattgaagctatttttcattagacgtttacttagaaactggttctgtgttgaatatgtagttaaaagtaaaaaataattgatactgaaagaataactttaagatttatttgtaaggattttttaaatagactttttaagagtttaaaagcaaatactgattttcaaaatattgttttagagaacctgttttgaaaggtcagaattttgatagtttaaatataagcatttcatttctccaggcacctatgaacagtacagtatctacaatattgtgctttacatttatgattagttttgaaatttaccacaaaagcagagttttttaaactgcaattttaatcagtggaactcagtatatagttagctttattgatgtttctttgtctaaacccagtaaaacatattccaaacagtccaatcagtgggtcttacatttattcaaaatgttttatcttttatctagaatccacacatagagataaccgattgggatggtaattaggataactaaaattctgggcctcatttttttttaaagaatccaaaacaaactaaactttactaggtacataagcttcttggtgagtttccattctccttttttttttcttttttttttttttcatgaaatgctaaactcgatggcggtatcttaaattgtgcaaaatattcgtattgaggaaggctgaaactttttttatgtcacttgaaagttaatcagagtatctgaaaggaattgtttttctaaaaacattaaaatattagttatttgttaaagaacaggtaaaatttttacttttgttttttaacctattatatatttttttttaagtaaaatatgtccaggagagtgaaagtaattttagcatttctaaaccacaaatgtttagtaataagcgtatccccaaaatatacttgagttagagtaaacaatccatttctaattaggtaggctccttgttagatgtcgtaaatcgtgatgagcagtagaagtgccagaacccctttgctgacccacagtcttggttttctagtctgtagcaccattcttccaggaggtttgcttctagaataggtgatgtaaagaaaagtagcagtataagcagtttgagggcagtcaagccttgggcaggtagggaaacttgtatcagcatcatttgacctgttggggacatgagttcaaagtggctttctggcttttctttcattggccagtccctcactacaacatgtagactccaatttatccctatcttaatgaagttccagggaccatatcatcagtgcccattgttatctcataattcctaataattttcattctgaatctgaagggaagagtcttttaacttaaggattcccaagaaggctttcttatgccttagaatgtaaaagtgccctaaaatttgtcctttttaaaattctctatacttttttttgtgcgtgctataacattcttacatgtattattctgtgattaaatctctgggttactataaatgatacctaaattctaaagagccagttctaattatcccaatatgactttatgaaaagggagggaataaattttgtctgctgttttgttggactgatttaaaagagtaaggtagaagagacaagatcctgaacctttcagaatggagaattaattttaaacttaaaagtttgttcccattactatactgatactgtctttgaataaatgaataaataaagaaactttttttttcaaaa

SEQ ID NO: 46 - protein, 295 aa, Sus scrofa
MSAANPETPNSTISREASTQSSSAATSQGYVLPEGKIMPNTIFVGGIDVRMDETEIRSFFARYGSVKEVKIITDRTGVSKGYGFVSFYNDVDVQKIVESQINFHGKKLKLGPAIRKQNLCAYHVQPRPLVFNPPPPPQFQSVWSNPNTEAYMQPPTMMNPITQYVQAYPPYPSSPVQVITGYQLPVYNYQMPPQWPAGEQRSYVIPPAYTAVNYHCNEVDPGAEVLQSECSVHEAAPSSGNGPQKKSVDRSIQTVVSCLFNPENRLRNSLVTQDDYFKDKRVHHFRRSRAVLKSV

SEQ ID NO: 47 - DNA, 22998 bp, Bos taurus
ggtctgctgccgctccctctgcccagtccggccgggcagcgggcacgagcagacccaacagcagctccaagcgcggtgcccgaggccaggctctgcttcgtcctcgagcccctctgagtgaacactggctgtcgccatcatggtgagtggaggaggcccagggggctccttggggtggccaggacgctgaagggggcctggggcggcacccggagcggggctgccgggctcgcctgtcctaggggcccagcctgagggcggccgaggcggcctggcacggcctccgcggcaccgagggcgggcggaggggatgaggccgggctgtcggagccctgggggccgccgcccagcacgtgcagggcttgtggccttcgggccgcaggagccggggtgtggcggggcgcctggcactcggcccgcggggcgcctggcactcggccggccgggctccgggcgggcccacgccaccccggaaggctcatttcccgcgctcaccgaggcaggcgggcggcccggcctccgcgagatggcgtcgggcctggcggcccgtgaggcgcacgcgggcgggacgccggcgggcggggcccccacgggccggggggcggggcctgggggtgtgtccctgcgggagggcgcgggcgccgcggggacctcgtgcttgtgcggcggcagcagccgcgccgacctcgggtgggacgccatcatctcctcacgaggtcggcgctgccctcgcctcggagcggccgcggagtggggagctcgaggaattttgaacttgggaaattcttttcccttaaagaaaccagaaaccttccaacagagcgtccttccagtattaacggggtctgttgggtgacatttatgagcgttttgttaaatgcattagagttgatgccacctcgaggagcatctcttgagaacagttttgaccaaccatcaagcttccgatgatgtatatagcattaaatactgtagtgtagtatatcgcctgtagtgtaataaccagtatacactatttttagaagtaaagggagaaaatttatatacagtttattagtgcacacaaagtttaaagtaaaagtttacaagtgtatgccactgctgtttgtaataattgtatcttgtacttatccacatcagtaattacttaataagctgagttactgtgaatgtttacagttttgtccttttttttttttaagagggcggggagagaaatgcatatgtttattgatttttttcttatataaaactagcatattaactcattagaaagtaatcaatgtaaggaagtagaggtccatcttaaactaggtatgtaaccactctgaagttttgatgtatgtcctcccagattactttcatgtatgtattgcaaataggtgtattttataaaaagtgtaccatgctatgtaacagtatattacaacctgtatccttcacttaatatagtgggccttattccaaagagaaatttaaaataattttgaatacataacttcttactttaccaaaaattgtgtacttatatattactatcacttattttaccacattcccttataatgagtaatttgtgtgcattaaaacagtacaataatgggtgtctttgtgaaaatgttttggcctatttattctattaatagcttgaaataaattgccaggagtagattgaatccctggttgaaaggttatacccatattataacaattttgaactatgataattttttcctagtaactcttggtgaaggatatactagtatatattcccactagtggtgtgtaatatcaccccctttccacgcagtgaaaggtagtatatgttttaaatttgccagtctaattggagaatattccacttgtgttgatgtacttttttttttatcattagtgaagttaaagtttgtcattaacgttttccatttctctttttttccattcttgatccacctttctatttgtatttgtcttgtcatggtgatttataagaactctatattaatatttacatttgtcatatataatggaaaaaatttatagtggtgataaggagagacccttatttctagtttcagcataaattactgtcatgttttactttgaacttaatgataatctagaattagattgatagaaaataaagttctttcattttacttttctttaaattaagaaatactgtattttatcaaatgatttttctgtggtgaattatactaacagatttcctaataaccatacttgaatttacaataaactgttcttaactgtgtattttttgtatgctgctagacttcccatctctgtgttgggtgcaggagtgtaccatcttaaccagatttggggatagtagtcatatcccattttttttcaagactaacgtgtatttttgtattcttgcctttttcttgcttagctttcccaggattgtatgtttattgtttggattccacctcccctcccctgagagtctactcttggatttacataaaaggctttattctgattttcatgtacagtttccttaatagaatttcctgtggctcagacagtaaagcgtctgtctacaatgcgggagacctgggttcgattcctgggtttggaagatcccctggagaaggaaatggcaatccactccagtactattgcctggaaaatctcatggacagaggagcctggtaggctacagtccatggggtctcaaagagtaggacactcactccatttttttctttaataactacttccttctctggatgtaacactgatgactgcaaattacagacttttagtctgacctagtcagtatacatagatttcagtttgcttgcatgtagactttaatagttgaatgaaatgttgtcaaagagctgacatcgcagatgctttagtgatgataagttttatttccagtttttagttatctttgtcacttgatcattcaaatataaaagggaatccgttactgaaaatagtagtgatgagaattgtgtatatgatggcctccaagttcacccttacttaatattccagaattactcattttagaacccatcaactcacttgaaggtgtaattaagaaaaataattacttctgtcatctaatttacatgtaatttattttctgcatgttattgattagttacgattaattctttaacaccaaacttttagctttaacctaaaatagcatcactagctcagtggacatgagtttgagtaaaattcaggagaaagacacagaagcctggtgtgctgcagtccatggagtagcaaagaatcagacacaacttagcagctgaacaacaacaggaattcatttgtagagtatttttggcaatagtttaaaagtacgcaaagattgtctattggttgtggatttgtatgcataagttatgtgctgctaatgctaagttgcttcagttgtgtccaactctttgcaacccaatggactgtgacctgccaggtcctctgtccatgggattttccaggcaagaatactggagtaggttgccatgccctactccaggggatcttccccacccaggaatcaaacccacgtctcctgcaggcagattcttgacccactgagccacctaggaagctcatatataagttaataattgtaaagaaatatacacacaggcagttttaaaatccctgttgtttaggcctcttgaaaggagtacattccttagtttagctttgagcgccatctgctggctaaggaataggatggacagaatggtgccttccttaagacctgaccatagtgaaatcactagatgaattttatacttaatatcacgtagaaggcaatggcaccccactccagtactcttgcctggaaaaatcccatggatggaggagcctggtaggctgcagtctatgacgtcgctaagagtcagaaacaactgagcgacttcactttcccttttcagtttcatgcactggagaaggaaatggcaacccactccagtgttcttgcctggagaatcccagggatgggggagcctggtgggccgccgtctatggggtcacacagagttggacacgactgaagcaacttagcagcagcagcagcagcagcagcatacttaatatcacaacctgtacaacccaaatttttctttttctcagattactgtttttttgtctcaaatatccatattacttaaacagaacatgagatttagaactttactcttcaattctgccaacaatatcacagggtttttcaactgaccctatgcagattcggggccagataattctttgttatggggggtggtgttggattgtgtgttggattgtaggatgcttattatatctctggtttctaccaaccagataaccaggtttgttgttggtcagtcactagtcactgtctgactctttgagacgctgtggactgcagctcaccgggtttccctgtccttcaccatttccccaagtttgttcaactcatatccattgggtcaaggatgtgatccaaccatctcatactctgtcgctcccttctcctggagccttcaatttttctcagcatcagggtctttttcaatgagtcggctcttctcatcaggtggccatagtattggagcttcagcatcagtccttccaatgaatattcagaactgatttcctttaggaacaactagtttgatctccttgctgtccaagggactctcaagagtcttctctagcaccacagttcgaaagcatcaattcttctgcactcagccttctttatggtcgaactctcacatctgtacatgattactggaaaaaccatagctttgactatacagacctttgttggcaaagtgatgtctctgctttttaatatattgtctaggtttgtcatagcttttctttgaaggagcaagcaacctttaacttcatggctgcattcgctgtccacagtgattctggagcccaggaaaataaagtctatcactgtttccattttcccccatctgtttgccatgaagtgatgggaccagatgccatgatcttaattttttgaatgttgagttttaagccaactttttcactctcctctttcaccttcatcaagaagctcttttagtgcctcttcattttctgccattagggtggtgtcatctacatatcagagggtgatatttctcccagtagtcttaattgcagtttgtgattcatccagcctggcatttgggatgatgtactctgaagccacactggtggcttagatggtaaagcgtctacccgcaatgcaggagacccggtttcgattcctgggttgggaagatcccctggagaaggaaatggcaatccactccagcactcttgcctggaaaatcccatggatggaggagcctgatagcctacagtccatggggttgcaaagagtcggacacgactaagcaacttcactttcactttcactctgtatagaagttaaataattagggttacaatatacaaccttgccatactcctttcccaattttgaaccagtccattgttccatgtccagttctaactgttgcatcttgacctgcatacaggtttctcaggaagcaggtaaagtggtctggtattcctgtcttttgaaggattttccagtttattgtaatccacacagtcaaaatctttagcatagtttaattgatgaattaattcattaatgaagcagaagtggttgtttttctggaattctcttgctttctctatgaaccagaagatgttagcagtttgatctctggttcctctgccttttctaaatccagcttgaacatctggaaattcacggttcagttctgttgaaatctagtctgaagtatttttagcataatcttccttatgtgaaatgagcacaattgtatgttagtttgcacattctttggcattgtccatctttgggattggaatgaaaactgcccttctcaagtgctgtggccacttctgagttttccagatgggctggcataccgagcgcagcacttacacagcatcgtctaggatttgcagtagctcggctggaactcgtcacctccactagcgctgttgcagtaatgcctcctaaggcccacttgactttacactccaagctgtctggccgtaggttagtgaccacaccatcatgcttccccagatcattaagactttctttgtacagttcttctgtgtattcttgccacctcttctgaatcacttctgcttctgttaggtccttactgtttttgccctttattgagcccatctttgcatgaagtgttcccgtggtatttctgattttcttgaggagagctctggtcttccctttctgttattttcctttaccaggtacacccgtcaactgagaaaaccaaaaggtgcccccgggtcacagaatcttccccaggttgagaatcaatatgttatcataaccctttttactccagcacagttttctgcgtgaatactgcacctctcaactgaaatacgtctatccattgtggttcacatacagctaataatataaatagtttatcaaataaaaaggtattgaaaattcattcacaaatgaaggggaaattgaagagaaagtctaagaatttcagaactgccttgggtgtttgaatgtgagttaattgaaagagattggtaaattttctatcttggaaagaaatctagtcgaatttctctatagttcaaggtatgtgacttatgtaatatagtcccatttagaaaaaagttataaaacatttaaaactggaaaagctttaaaatagtttttgttctctctgacttcattgtcatgaaatatcactgtaacatagttaaaggaaagagttaggagatgttcagatagaaacacaaagtatgttggaacattagcatgagcatgaattaatagagaaaagcccaaacactccaatttggtaatacagcaatttttatttcatctctatagcagtttgtagaaatcttaaatttatcgtaatttctggcatctaacaaaataggaactcttaatttccattattgtaactaatttctataacattctgctaatattttcaaaaatatctatcggtttcttttgtccttgttcctgttttccttcataagctaaggcataatatcttcatctttaccttgcagccttttgtgcttactattattgttattgttgttcattcagtcctgtctgactctctgtgaccacatggactgcagcatgccaggcttccctgtccttcactgtcttcctgagtttgctcaaactcatgtccattgaatcggtgatgccatccaactatctcatcctctgccatcctcttctccttttgccttcagtctttcccagggtcagggtcttttccagtgagttggctcttcacatcagggggcaagagttttgtagcttcagcctcagtctttccaatgaatattcagggttggtttcctttaagattgactggttagatctccttgcagtccaagggactgtgaagagtcttccccagcaccaccattcagaagcatcagttcggcgctcagtgtttttatggtccagttctaacatccattcatgactactggaaaaaccacagcagtggatctttgtccgcaaagtgatgtctctgctttttaatatgctgtctaggtttgtcatagcttttcttccaaggagcaagcgtctttaacttcatggttgcaattagcgtctacagtgattttggagcccaagaaaataaaggctgttgctgtttccatttttccctgtcggtttgccattaaatgatgtgaccagatgccaggattttagtttttagaatgttgagtttcaggctagctttttcactctcctctttcaccttcatcaagaggctctttagttcctcttcaccttcttggattagggtggtgtcatctgcatatctgaggctggtgatatttctcccaacaatctttgattccagcttgtgattcatccatcccagcattttgcatgatgtactctgcatagaagttaaatgggcagggtgacaatatgcagccttaaaaacaaattatatttcatagcatctatgattttagcctgtgaatctagtgatgacatctgctttccaaattacagtctgctgcaaatcctgagactccaaactcaaccatctccagagaggccagcacccagtcgtcttcagctaccaccagccaaggctatgttttaccagaaggcaaaatcatgccaaacactgtttttgtcggtggaattgatgttagggtaatgtattcatgttttcatttattgaaagtattttgtgaatagtgggatttgggtagtgttgtaaacataaggagaaggaaatggcaacccactccagtgttcttgcctggagaatcccagggacggggaagcctggtgggctgccgtctatggggtcgcacagagtcggacacgactgaagcgacttagcagcagtaaacataagactttgttttttttttttaaagtacttcatgcaggtttggaattgtttttatgtataacctttaggggctaaaatatctttgatatagatatgtagtttggggatgcttggaggagatatttccacatcaccaaaacttctttatagtatcattgaaatttttgaatgttgaatttttacttttaaaaatcaaattcttctgcatagatggatgaaacagaaattagaagtttctttgctagatatggttcagtaaaagaagtgaagataatcacggatcgaactggtgtgtccaaagggtgagtaaaacatatgttcaatataaattataataaatacctcaactatatagcatgtatagaattccagaaaagaaaaatcgaaaacgtattctcacatttgcataagagaaatttgttgctttgtaactttcatgtagaggataagttttgctgccagctcttttatttaatcatttgcctagtgtttgtatttaaatatttcttgtcttcatttcacataagaggattagtcagttttatcaaagaattgttttcttcatacgtttcacagtatcttaaattttaatgattttgccatagataataagttaaactcagattcataggtatgaattttttgttaattaagttcctacattgccttaatctttgtgaattctgacacaaatctgtagatcagggtaggaaagtaaaacagtagtatttatagagaatctaccacgtacatcttatagttatttacctcagtatatttttcatcctttatcattatttagtcagttatagaacactagttttaaaccatgtactgatacggtggtgattttatacttcatctatctgactttctagctatggatttgtttcattttataatgacgtggatgtgcagaagatagtagaagtaagtaatcttcttttggaaaaaatctctcatgttatggatgtggtgtttagtattatttgtgtcctgaatatatactcattcttttataagatatagaaataaatatatttcctgtttgaaactcaggcttggaataatttacataacttaatcagaacctctgtatttttgattgaacatccagcttcatgaactagagacaggaaagattagagacagagtaaagtttttttttttttttaaatcaaattccataacttctcaaaattttattagagtgaaggtaagtaaggtggtttcatgctgtaagttttgatttggtatattcttaacactgatcttacctgatactagtaattttagagaacttgggtattaatcaaagtcttggaagtaaagacttggacattaattctagttttgatactgttttattttcagtcacagataaatttccatggtaaaaagctgaaactgggccctgcaatcaggaaacaaaatttgtgtgagtaaagaaaggaattgttcttgttgacacatgtgtggcttttcagagaactgaaaataggctttgttttctttttattctttaaaaaggtgcttatcatgtgcagccacgtcctttggtttttaatcctcctcctccaccacaatttcagagtgtctggagtaatccaaacgctgaaacttacatgcagcctccaaccatgataaaccctataactcagtatgttcaggtaagaagtatctccactcctttttttaaatttttttggtgtgtgtattatactagagatcttattattgatgcgagcaccttaaagagtaagcccgtcttagttcttaccctctatggagtcatgtcaacgatttccatagtacgtgacaatcctagtgctgtttgaatccttctaaatggtgggacgttgtgttagaaatgtcattcttggcgttgcttgttcttgttattgttcagttgctaagtcctgtccaactgtttgcaacgccatggacggcaggatgccaggcttccctgtccttcactatctcctggagtttgctcaaacgcacgtccattacttcagtgataccatgcaaccatttcattctctgttgtcctcttctcctcccaccctcagtctttcccagcatcagggtcttttccagtgagttggctctttgcatcaggtggtcatattggagcttcagcttcaatatcactccttcaatgaataatcagggttgatttcctgtaggattgactggtttaatctccttgctgtccaggagactctcaagagtcttcttaaggaccacagttcgaaggcatcggttcttatgtgctcacgctttatggtccaactctcacatccatacatgactactggaaaaaccatacctttgattatacagacctttgtcagcaaagtgatatctctgctttttaatatgctatctaggtttgtcatagtgttttttccaaggagcaagcgtcttttaatgtcatggctgcattcactgtccacagtgactttggaacccaagaaaataaagtctaccactgtttccattttctcccgtcgatttgccgttaagtgatgggaccagatgtcagaatcttactttttgagtgttgagttttaagccagtttttccacttgcctctttcaccttcatcagggagctctttagttcttcgctttctgccattaggatggtatcatctgcatatctgaggttggtgataattcttctggcaatcttgattctagcttgtgattcatccagcccagcatttaggatgatgtactctgtgtagaagtttatttatcagggttaccacgtacagccttgcaatatgccgttcttaattttgaactagtccattgttctatgtctggttctaactgttgcttcttgatctgcatacaggcttctcaggaggcagataaggtggtctagtattcccatgtcttgaagaattttccttagttttttgtgatccacactttgaaaggctttagtatagtcaatggagcagaagtagttggttttctggaattctcttgctttctctatgacccaaaacatgttagcagtttgacctctggttcctctgccttttctaaatctagcttgtacatctggaagttcttggttgacatgctgttaaaccctaacttgaaggcttttgagcattaccttgttagcatgtgaaacaaggtcaattatatggtagttcaaacattatttggcattgcccttctttgggattgaaatggaaactaacctttttcagtcctgtggccactgctgagctttccaaattttctgctatgctgagtgcgacactttaacagcatcatcttttaggatttgaaatagcccagctggaaatcccatcacctccactagctttgtttgtagtgatgcttcctaaggtccacttgacttcacactccaggatgtctggctctaggtgagtgaccacatcactgtggttatctggtttgttaaggcctttgttatacagttcttctgtgtattcttgccacctcttctgaatctcttctacttgtagtaagtccttggcgtttctgtcctttatttcgcccatctgcatgaagtgttcccttggtgttacttcttatcctaagcttaagtctgcttctgtatagttggtaagtctttatctgagaactgatcactgtagccacatggaatatatctcctttctatttttcccccaaataactcctaaaatgcttgaagacagttttcttcatgtgtttacctggtttattctttcctagggtcaactagtctttatttgcaatgatttccaagtgcctcttcatacagattgttgatttctagatgtattgtggttctaacatggataaatttctgacgatttaattatatttgtaagttctatgagtttctggcatataatttgtcttgatttctttaatattgaaatttggaatacttgtctcctattgataataaataacatttattttcttcctacttcagtttaccttcttcgttcaaaagacattttattcttaggaaaagaaataaaataatagtgaaaaggctctgcagtatctctggtttatttgcatttttcatctacctgaagtatagaatatatcttttcttacattaaaaaaaaaaacagctacaagaaaagccctgcttgttcataaaatttaccatgaggtattattacctattctggtatatttttgtatactagtacctagatattttcagtcaataaatatttattgaaatattttttgaatatttattgaaaatatttattgaaatacctcttttccaggttggggttgtacattgcccttaacttttagaagtaaaacacaggaagagccaaaatgtctatggggagtattccgtgttaccccaaaatactgtcaaaggaatacaaaactgcctacgagtatctttacaaaaaaatagcacacatgtattaatttaatgctaacatgggaatctgttctaatagagcttcatcatgattaagaaagaacttctgggtgggaataaatatacaaaaaagatgaacttgggcttgcaaaatcagtcactgcctttatttatctcttccttctcccagcccaaaggctaacatttgacagagaatacttacttcttcatgaaagcactcactcagaattttggattggatataaaaaaatgaagatttccttattttcatgtttttattgcattgggaatgatactcctttctgatttttaaaaatgtacgttgttcattcattctttctgtaaactttgtttgcaggcttatcctccttatccaagttcaccagttcaggttatcactggatatcagctgcctgtttataattatcaggtaatttaatagggatcaaaattatttactttggaatattatttaggcctttatgtaaatttccctaatagtttgtcatttaaaagtagttgagtgtgcctaaaatttaaggagaaacagaattagtctaaaattagggcttctttattatttagaataagaataatattttgacagaaatgagcttagcaagctttctcttgtactgtcttacaagttttggtgtcctcttctatatttcagcatgtagtcttcatttgctgtctaatagctaaaacatacaggctggatcttatgagtctttatagaggcataggttgagataaaatggttactcagttcttagagcattgaattgcaattatgtttgataatgtttattttagctggctactagaatttctgtccatagataatgaccgtatctgtgacactgtggtaataaattcaaagagctactgtctcttgagttttcctgaaaaccaactccagaaaattgagaaaaagatgaagttaatatatgaaagtaacaataaaatcatacatatcataaagtacttttccattgtcttttgttataacaagctcaaggaaaccagcaccagtacttcagcattgtctatttcagatccttgtgacagtgtaaaggaatatttaagtaagcgttcttttctttctttttttttttttaagatgccaccgcagtggcctgctggggaacaaaggagttatgttattcctccggtaaggtgaagtagccgagcatgtacttcctgttctgtattttaaaagtattttactgttaacgtatttcttgacccttgccatatcaagtatgcctggaaatattttaaatgcctttttactttatgtgttacatttctttgcactcaagtgtatacacacacacacacacacacacacacacacacactcactcccatgggagaaactgtgctttttgtttctcagattattttgtctgtacttgagcaatggccgccctgcataccccggtgctcagaatatgtaaccaagaaaggtagtactaatacctgtgctatttataactccaaggatttatgattaatattgaatctgcatcgagttttctagccaaaaaaaaatctgttgagagaagcaaaaatgttttgctctcaacactgttacataagaaaatgaataaaacagaagaggaagctacctctaaaatatctgagcctttgttaccttctgtcttttatcaggattggatatttgaaggacataatgtgagcaaaaatcctcaggcactgggaaattcccttcccattcccatattatatgttgaagtttcttacagaaattctctaattctaattatgttgacatttcaaaatataagattcccatattgcatttcaactatttagtttaaaatagtttctgaaataatgtaattgaacctcagaacaatacacatttaaactttcagtgtgagctcactattttgcagactatctaatgtacatctctttaattacacttttatccttttaaatgtaggcttatacaaccattaactaccactgtaatgaagttgacaccggagctgacgttttgcccagtgaatgctcggttcatgaagctactccgtcctctggaaatggcccacaaaaggcaaacgttgacttttgttcattaacgtttatgtttctatatgtgctttattcaagttttaataatggctctttgagaaacagatatctttgctcaaatttaaatataaaaagcttgagttactgactaaaagcttcacaatttacgtaaaagttaatgaaattctaggtacctgcaaaccagttactgatttagttgtccttccctttcttccattttcattgggtttttttggtttgttttttaaccatagtttaataaatattaacatggtttgacagagtccaaagggtagttttcctcgagaatcctactcttcaaaagagggattagtatggcttctgtccgcctgtttttcaccagtgtagacatttgcttagatgaatcgcattgcacagttgttcatggcattctcaccacagcatcacatctagtggcagtcctcgagagtgctgggctcactagtaatggaaatacttaaatagagggatttctttttatcattttagagcaaatccctgtaatctctcattcttgaattctgtgtcttttgaatggatgaggatgtgaaaagtaattgatctgactggaatatgcacaacactgaacgattcccataacagtaaacaattaccattggagtatgtgtacttccttcgtgtatttctcaatggaaaaaattttaaattactgaactctgcagtgaaaataatcccagatttgtgatacaatttaaattaaaaaaaaaccaccaaaataacttacagttatattatcagagtttaacctgaataaatgtttcttgaaatgttgagggctcactatttccagtctaacaggaaaaattaaaaagacttaaaaacagctatctgaaggcttgactaattgagctttctaaaccagtactctatcactaagtttatgaaacaattcttaaatttggtataagagttacatactatgtgacatggtgaaaatgaaaaaattggatgagaattctttagaaataagtgtatgtattcattaagatttttcaaaaagcttgttaccagtgagtaaaagaatgaagagtctttactgaaaacttctgtgtttcagaaatctgtggacagaagcatacagacggtggtatcttgtctatttaatccagagaatagactgagaaactctgttgtcactcaagatgactacttcaaggtatgaaaagaattatatgtaggataaaaagaacacttgtcacccataaagcatctttttttttcctgtggtatacatatgtgtgtgtgtgtgtgtgtgtatgtatatatatatatatatattgagcttacatagagcatataattgaactcttagcttttgactgtagcctgagagtgagttttaagtagcagtgtatctgcttaaatcttggtatagtgtaggttacccttagggaagaaatctttagcagaagcgtatgatttaggtactaaacagcaacaataatactgtaattcaaagagttctcgaaagttgaccaaataggaaaagaaaattttagataccaaaaacagaacttagagtatgtggatcttggactaaggagaagaaggaattgaatactcggctgatgcacttgaaccttttggtggaagacgtaagtgaagtagtaaaaagagctgagtagaaagaaagttgattcagagttggtacagtggagaagaatgtgggtgttagaatttaagaatgggtctgcagtttctgatcctagtgctatcaccttggacaagtcacttagatcttactaaggctctagtttttacaagtctgaaatgagtctctaagatccctttagttctcagtctctgaacatggaaaggaacttgtcgcttcaccaaaggaagaatattgtggttaataaagggaagttttttgttgtgtttttacagcaggcttattgagatacaattttcataccctgcaattcacccatttaaagtgtgcaatttaatatttcatagaatatgcacagagttgtacagtcataactgcaataaattttagagtattttgatcacctccaaaataacgccccctacccattagtcactctctgttctccccaactctctagccttcagttcagttcagttcggttcggttgctcggttgtgtccgactctttgtgaccccatgaattgcagcacgccaggcctccctgtccatcaccaactcctggaattcactcaaactcctgtccatcgagtcagtgatggccatccagtcacctcatcctctgtcatcctcttctcctcctgcccccaatccctccctctttaagaatttgcctgttgtgagtgtttcatgtcaatagaataatacatgttaccttttgtgactgacttctaccgactgaaatgtttttgaggctcatcgatgttacagcatgtattaatacttcgttttctttttatttatggatctaccagtttgtgtttatcaattcatcacttgctagacatttggcttattttccacttgaaggccctgatgagtaatggtatgaacatttgtgtactaatttttgtgtggacataggtttttatttctcttgggtatatacctaagaatgaaattgctgagtcaaatagtaactgtgtttaactttccaaggagctgccagaatttttccgaaatgcagcattttacattcaaagggaaattttaaaccattgctttgtattttaaaacagggaaaggcgaataacttttttccaccaatgaatggaaataggataaaacttaaagcatttttagaagaagtacttagggcttcctttaatacaaaagactagagctgtagcagaattaagttcttagccatcttctcaatagggagtagacttagtcatttaaagttgacttttgttctcttgtttttcattgtacatagatagtaaatttaaaaggaaagaattgggggccgtgtgacagcttactttgcccaaggttctgaaggttaaacaggcagtactaacggatttgtttgtaaagcagaaactctttacccagcgagtctttacacttgactttttacctggtactaagcaaaggcctacctttgaaccttgcaaagttttctgctcctctgagcgaaaagttggaagttgtctagcatctagacctgtttattttgattagctaaatgttgttattgttgttttaattgaatttaaatgtactaaggcaggatatggagaaggaagtggcaacccactccagttattcttgcctggcaaatccaatggacagaggagccaggtgggctacagtccatgatgtcgcaaagagtcagacacaactgagcactcacacaacacaggatgtaccctctttccatgataaattccactcttaattccagccccttcataatctttcataccctgtctgattttttaaaatacttgagtttgtgaccacttttctggactttaacctaaataggatattaccctgttaacacgttacataatttccagaagctaccctttatatgatagcggaatttaattcctaggaaaaggacacaattaagccaaaagcacagagaagaaaatacttttattatgttattactggttctcaaacttccctggtggttcagacggtaaagcatctgcctacaatgcgggagacctgggtccaatccctgggttgggaagatctcctggagaaggggatggaattagagataccaaaggaacatttcatgcaaacatgggctcgataagggacagaaatggtatggacctaatagaagcagaagatattaagaagaggtggcaagaatacacagaactgtacaaaaaagatcttcacgaccaagataatcacgatggtgtgatcactcacctagagccagacatcctggaatgtgaagtcaagtgggccttagaaagcatcactacgaaaaaaaaaaaaaaaagcatcactacgaacaaagctagtggaggtgatggaattccagttgagctatttcaaatcctaaaagatgatgctgtaaaagtgctgcactcaatatgccagcaaatttggaaaactcagcagtggccacagggctggaaaagatcagtttgcatttcaatcccaaagaaaggcaatgccaaagaatgctcaaactactacacaattgcactcatctcacatgctagtaaagtaatactaaaaattctccaagccaggcttcagcaatacgtgaaccgtgaacttccagatgttcaagctggatttagaaaaggcagaggaaccagagatcaaattgccagcatctgctggatcattgaaaaagcaagagagttccagaaaaaagatctatttctgctttattgactatgccaaagcctttgactgtgtggatcacaataaactgtgaacaattctgaaagagatgggaataccagaccacctgacctgcctcttgagaaacctatatgcaggtcaggaagcagcagttagaactggacatagaactggttccaaataggaaaaagagtatgtcaaggctgtatattgtcaccctgcttatttaacttctgtgcagagtacatcatgagaaacgctgggctggaagaagcacaagctggaatcaagattgctgggagaaatatcaataacctcagatatgcagatgacaccacccttatggcagaaagtgaagaggaacttaaaaagcctcttgatgaaagagtgaaaaagttggcttcaagctcaacattcagaaaacaaatatggcatctggtcccatcacttcatgggaaatagatggggaaacagtggaaacagtgtcagactgttttttggggctccaaattcactgcagactgtgactgcagccatgaaattaaaagacacttattccttggaaggaaagttacgaccaacctagatagcatattgaaaagcagagacattactttgccaacaaaggtcggtctagtcaaggctatggtttttccagtgctcatatatggatgtgagagttggactatgaagaaagctgagtgccgaagaattgatgcttttgaactgtggtgttggagaagactcttgagagtcccttggactgcaagaagatccagccagcgcattctaaaggagatcagtcttgggtgttcattggaagggctgatgctaaagctgaaactgcaatactttggctacctcatgcgaagagttgattcattggaaaagaccctgatgctgggagggattggaggcaggaggagaaggggacatcagaggatgaaatggctggatggcattaccgactcgatggacatgggtttgggtgaactctgggagttggtgatggacagggaggcctggtgtgctgcggttcatggagtcgcagagtcagacacagctgagtgactgaactgaaactgaactgaactggttctcagctccatccttctacattgtaaggcctcatttcttgtatctgcacatctgctggcaacaaagtgaaaggaaatttttgcatatactttaatttttctattcatttccttaaaaattacatatcttcattatagcttaaggatatgcctttaaagatgccaaaacttgtatcttttaacctaaaagcatagggtttcagattgaaatggagtgctgttctcaaaccatcataaagccatgatttctgttagatgtattttagtaaaaataagacttttaaaaatttcatgtttttcaccagctgtctttgggacatcagtgcagaatcatgaattaataagaatctacatattagaaaactagatttctaagtcctctttttctgagtcactgagatttttttaactgaattgttgaataaaactgatcattggtacatttgttatctgaaagttcaggaatgctttcacaaaaggatcacttttctgtcattatttattgttttaaatcttaaaaaaatgctttcttttaagtaattttcaagtctcttaggtcataatggtaataggaattttcaatgaaattaaaatggattatttctgtcttttctaggataaaagagttcatcactttagaagaagtcgggcagtgcttaagtctgtttgatcctctctgctaactttctagtctcataggaagtcacaggttttgaatagtaagagactgaaagtttttccactgttatagaaatttaattctgaattttgataaatcacactcagactttctatatgttatattagattgcttagttttattttacattgaaactttttcattagacatttacttagaaactggttctgtgttgaatatatagttaaaagttaaaaaataattgagactgaaaagaataactttaagatatatctgtaaggatttttacctgacattttaagagtttaaaaacaaatgctgattttttgggaaaaaaaaattgttttagaaaacctattttgaaaggtcagaattttgatagtttaaatacaagcacttcacttctccaacaagtacctatgaacagtacagtatctgcaatattgtgcttttatgatttgtctagaaatttaccacaaaagcagagtttttaaaactgaatttttaatcagtgaaactcaatgtatagttagctttattgaagttttccttatctaaacccagtaaaacagattctaaacaaacagtccaatcagtgggtcttatgtttattacttcaaaatactttatcttttatctagaatccacacatagaggtatctgatgggatggtaattaggattactaaaattctgggccaaatttttttttaaaagaatctaaaacaaacttaacttttctaggtacataaacttcttagttgagttaccattcttttttcttttacttttttttccccttgaaatgttaaactcaatggctgtattttaaattgtgcaaaatattggtattaaagaaggctgaaactttgtcacttaaaagttaatcagagtatctgaaaggaattgtttttataagaaacattaaaatattagctatttgttaaagaacagatagattttaatttttttttagcctgttatttttctttcttttttttttttttaagtaaaatatgtccaggagagtcagagtagttttgatgtttctaaaccacaaaagttgtttagtaataagcatatccccaaaacacacttgagttagttaacagtccatttttagatgaggtggctcctcctcagacattgtaaatcgtgacaagcacctggagatccagagcccctttgctgtacccacagtcttgcttctccagtctccactgttcctgcaggtgctcctggaacagcgatggaaaggaaaggaggaggagtataagcagtttgagggttaagccttggaaggaaagggtagcagtgggataatccctttctaagggattcacttggagcagtatcgtttgacctgccatgggtttagaggagcttcctggcttttctgtcttgggccagccccttcattaaaacacggaaactccgtatagccctgtcctgacgaggcttccgtgggccgtgccatcagtgcccgttgtcttagcactcctaataattttcgttctgaatctgaagggaagaatcttttaacttaatgatacccaagagggcttttttatgcctcagaatttgaaagtgccctgaaatttgttctttttaaaattctctgtacttttttgtgtgtgtgctataacattcttacatgtattattctgtgattaaatctccaggttactaaaaatgatacctaaattctaaagagccaattctcattattccagtatgaccttattcgcttaagaaaaagggaataaacattttgtctgctattttgttggactgaagtatttaaaagagtaaggtagaagagacaaaatcctgaacctttcaaaatggaaaattaattttaaacttaaaaatgtgttcctattacctatgctgatactgtctttgcataaatgaataaatagaaataaagaaa

SEQ ID NO: 48 - protein, 295 aa, Bos taurus
MSAANPETPNSTISREASTQSSSATTSQGYVLPEGKIMPNTVFVGGIDVRMDETEIRSFFARYGSVKEVKIITDRTGVSKGYGFVSFYNDVDVQKIVESQINFHGKKLKLGPAIRKQNLCAYHVQPRPLVFNPPPPPQFQSVWSNPNAETYMQPPTMINPITQYVQAYPPYPSSPVQVITGYQLPVYNYQMPPQWPAGEQRSYVIPPAYTTINYHCNEVDTGADVLPSECSVHEATPSSGNGPQKKSVDRSIQTVVSCLFNPENRLRNSVVTQDDYFKDKRVHHFRRSRAVLKSV

SEQ ID NO: 49 - DNA, 2544 bp, Mus musculus
agccgaaagaaggtctaaagagggaactgtaagactttggaaagagctatgcagtccaaacgggagtgcgaggtaagtaaatgaagacctaagtgattgttgggcacggcctgcagaaggggatggttacggtgacccccaacacctctaacgaggtggaccagggccggtgatgccccattccaacctacctttctcccccagcaatggtgtgagagggtgaatccagagaacaaggcagccctggaggcgtgggtaagggagactggcatccgcctggtgcaggtcaacgggcaaaggaagtatggagggccacccccaggtacagtagccccagcccctgtgacactaggccatcctcggccactctttatagataggatccaaagtcagaaaacccaaattacctgacgtactctctactagatgtggctatttgtctggcctcccttccacactggccttcaaggatggtgccagcctagttgtttatagtctagtccaattatggtaacgacccccaggagccagaaaggtatcaatatttccagatggtctccctcccatccccacccctaccccccccccccagctttatcctggagcttaaaaacatccttgtggaccacagtaaccaacaaaatcctttccctccaggctgggtgggcagcccgccaccgtcagggtccgaggtgtatatcggacgacttccgcaggacgtgtacgagcaccagctaatcccactcttccagcgcgtggggcgcctctatgagttccgcctaatgatgaccttcagtggtttgaaccgcggctttgcctatgcgcgctacagctcgcggcgcggtgcccaggccgccattgctacgctgcacaaccaccagctgcggccttcttgccagctcctggtgtgccgaagcaccgagaagtgcgagctgacggtggacgggctgcctcttagcttaaaccgccgagcgttactgctcgccctgcaaccgttcggtccctgcctccaggagacactgctgctacccagccctgggtctgcgccctctcagattgcgctgctcaagttcagtacgcaccgagctgctgctatggccaaaaaggccctggtagaaggtaggggtggaaggtgcggaagggtggctggctacttaacaacatacccccaaatctatagtcaggcacaagtggagttcctgaactactgccatattaatgctactaccactacttacctatatttaagtcacttgtcttactagttttgggtggttttttgtttgtttgttagttcgttttttccgagaccgggtttctctttgtaatagcccaggctgtcctggacttaactttgtaaattaggctggtgtcaaactcaatgatatacctaactgtgcctctcaattgctgggattaaaggtgaattccagacgtgctaatgcagccagtaccacagtggaggataaacagtgataaatcttagtttcagttttctttgaccagaaaggtagctattgtgatggttattaagcaaatagagcctgactgctttgtattcccctagggaataatgaagcccagggaagttgtcacaccacctagaagtgtagaggcattaaacatagcctgtggcaagtcacttcaaagtctggtcttaagtgcttgcggctcctagtgtttaactctgcccttgtctctctgcctttttttttattttttgacaggtcagtcacgcctctgtggagagcaggtggctgtggagtggctcaagccagacctaaagcagcacttccgccagcagcttgcaggtccctcactgcggttcctcaggccagatgtcagccaactaacccagaccagggagaagctggggtcccaaggggctcgggctgccctgcaactgctgtgtcaacggatgaagctaggcagcccagtgttcctgaccaagtgtttaggaacagggcctgctggctggcatcgcttttggtaccaggtggtgatccctgggcatccagtgcctttcagtggcctcatttgggttgtgttggcctctgattggcaggatgggcatgaggtggccaaggatgctgtgtccgcacagctgctggaggcactgagtgaacctaggaccagcttgtggtctcctggggctgaagcaggtactatggttaagcagtgaccccttctttttacaggtaccctaaatgggttaagcagagcctgtgccaaccccccagcccagcaggcctgggcagcccagggcctggtgacagctttccctgctgggacagggccctgttgcacctaagtgctactttagttgtgaggaaccttgccctcccccactgagcccagggtctgacctgctatccttagtcaattcccagcttggcaccagagcttactatgaatctttgtttttatttggagaactggctgaaccaaagagcccttcctcccaccacttgtccctggtttgggcttacatggtttttgtttttctatactggttttatttatattaaaaccccagttggtata

SEQ ID NO: 50 - protein, 352 aa, Mus musculus
MQSKRECEQWCERVNPENKAALEAWVRETGIRLVQVNGQRKYGGPPPGWVGSPPPSGSEVYIGRLPQDVYEHQLIPLFQRVGRLYEFRLMMTFSGLNRGFAYARYSSRRGAQAAIATLHNHQLRPSCQLLVCRSTEKCELTVDGLPLSLNRRALLLALQPFGPCLQETLLLPSPGSAPSQIALLKFSTHRAAAMAKKALVEGQSRLCGEQVAVEWLKPDLKQHFRQQLAGPSLRFLRPDVSQLTQTREKLGSQGARAALQLLCQRMKLGSPVFLTKCLGTGPAGWHRFWYQVVIPGHPVPFSGLIWVVLASDWQDGHEVAKDAVSAQLLEALSEPRTSLWSPGAEAGTMVKQ

SEQ ID NO: 51 - DNA, 2882 bp, Sus scrofa
tttcctaggaggtggggccgcccggagacccacccgccggggtctccggcttccacctgcgagtcggaggttcccgaggcgcacgtgcggcgggtccccccacccccttgagaggcggggtcgtgccctgagccaatgagcgcctgggggggtggaggcgtggggaagcttccagataggccgacagggcggaggttataaagggggcacgggcgagccggcgggagagccatgcagtccaagcgggagtgtgaggtaagtgctcggctgcccggggctcgctgcgtccgcggcatcccccgcgaggtggggcgggcgcggcggtccgcccctccaacctgccctttcccccccagctgtggtgtgagagggtgaatccagagaacaaggcggcgctggaggcgtgggtcagggagacgggcatccgcctggtgcaggtgaacgggcagaggaagtacggcgggccaccgccaggtatgctagtcccggccccctcgcctgcggggccgcctaaggcagcctcgacggccccgacccgcggcgcctgggggaggggctgggcgccaccgtcaggaaccccgaattacccgttgcaggccccgccccaagcagatgaacttcttgtccgtgggtcccaagccgcccgccccctcgaggaaggaagcctgccttaaggtgccctccccgctgttagctcaagtcacccacctacttaacaccagcggcccggtggggttgtacccatttcacggacgtgcacgacttacccctcccacgccgggtccctgagccgcgtcctcagaaccttccgggggggtgacggcgcccctctccacccctttccgccaggatgggtgggcagcccgccgcccgccgggtcggaggtgttcatcgggcggctgccccaggacgtgtacgagcaccagctgatcccactgttccagcgcgtgggccgcctctacgagtttcgcctgatgatgaccttcagcggcctgaaccgcggcttcgcttacgcccgctacagctcgcggcgcggcgcccaggccgccatcgccacgctgcacaaccacccgctgcggccgtcctgcccgctgctcgtgtgccgcagcaccgagaagtgcgagctgagcgtggacgggctgccgccgggcctgagccgccgcgcgctgctgctcgcgctgcagccgctggggcccggcctgcaggaggcgctgctgctgcccagccccgggccggcgcccgcgcagatcgcgctgctcaagttcagctcccaccgcgccgcagccatggccaaaaaggccctggtggaaggtaggggtggagactgcgggggtcgctggttggggccagacacgttctgcggacattctacctttgcactggagcataggttggcatcgcgggttctagttgccaggccttcgggtcaggcccacccgaaggggcgacggaaactatttgacctccccctgaatctccactgatgctgccaaccaccgcttaactaagctgaacacagaatgctcttcctctttagatatttaaaacactcgcttgcccaaggcattccagctgagcctacctcttgcccaccaccgaagctaagctatttcctcacacagctgtgagaattgatcggcacttaacacattctctagttctcggctagtgttcaaggtaaaggttagctattgtgatggttatgaggtgtcagagcctgcctcggccagtactccagggaaactgaagatagtaggtattatggttcttttgtaaataagcacaatgagtcctagagaagttatttaacttgcctgagatccaaccaccaggacatggggctgctggaaattaaacaggcctgtgtggctccaaaggactcacagaggtgcacgtgggtgggggagatgttgggccctagggcttagacccgacctgtccccctttttcctgcagggcagtcacacctctgtggagagcaggtggcagtggagtggctcaagccagacctgaagcagcggctccgccagcaactcatgggtccatcgctgcggtgcctacagtctgagggcagccagttggccctggccagggacaagctagagtcccaaggggctcgggccgccctgcagctgctgtgccaacggatgaagctgggcaccccagtgttcctcaccaagtgtctgggcacaggccctgctacctggcaccacttctggtaccaggtggtgatccctgggcatccagtgccgttcagtggcctcatctgggtggtgctggcctcagatgggcaggatgggcatgaggtggccaaggaggctgtgtctgcgcggcttttggagacgctgagtgaatctggggccagcctcctgcggtccgctgtggctgaggcaggtaccatggttcagcagtgacctcatcctctccgtaggcagcctgagcaagtagcagagcctgtgtcagtccctggcccagcaggcctgggcagccaccatctgatcccaagaagcgaggagcatgggccctgccctgggcctgacacagcctcttggttgggacagggcccccatgcacctctgggcaactaggtttgaccaagttgtggggagggacttcgccttcccctcccagcccagaggctgaccccaagattgttctgtgtgtgacacatacacacccaccctctggcctcttcccgaagcttagcatgaatctttgcttattttttgtcttttctgatgtttttatttgggggctggctgagccaaagggtcagaagcctgccttggcccctgccacttggcattctggttttggtgtacgtgtagcttttgagttttctgtgctggttgtatttatattaaacccctggttggtgtaca

SEQ ID NO: 52 - protein, 353 aa, Sus scrofa
MQSKRECELWCERVNPENKAALEAWVRETGIRLVQVNGQRKYGGPPPGWVGSPPPAGSEVFIGRLPQDVYEHQLIPLFQRVGRLYEFRLMMTFSGLNRGFAYARYSSRRGAQAAIATLHNHPLRPSCPLLVCRSTEKCELSVDGLPPGLSRRALLLALQPLGPGLQEALLLPSPGPAPAQIALLKFSSHRAAAMAKKALVEGQSHLCGEQVAVEWLKPDLKQRLRQQLMGPSLRCLQSEGSQLALARDKLESQGARAALQLLCQRMKLGTPVFLTKCLGTGPATWHHFWYQVVIPGHPVPFSGLIWVVLASDGQDGHEVAKEAVSARLLETLSESGASLLRSAVAEAGTMVQQ

SEQ ID NO: 53 - DNA, 2718 bp, Bos taurus
atgcagtccaaacgcgaatgtgaggtaagtggttggctaccagaaagtccatgaaccctgggcatcactggcgagacggggacgggcgcggcagtccgccattccaacccacccttttcccctcagctgtggtgtgagagggtgaatcccgaaaacaaggcggcgttggaggcgtgggtcagggagacgggcatccggctggtgcaggtgaacgggcagagaaagtatggcgggccacccccaggtaaggtcttaccagccgtatgcctgctagggggctaagccagcctctacggccccgactcgccgcgttcaggggagggaggggcctaccccgaggctccactcggagttgagtaggaaaccccaagctacccgttacacgcactccccagcccaagcagatgaaatttataatctgtgccttcccacccacccgccccctcgaggaagggagcaagtctagtcttaaaatgccagtcccattggtaattcagtcactcgattatgccgacgacccggaggattacgggtgttttacccatttcacaaacgtgtgcacacgtactccctcacgcgctcggtccctggaccccgacccaggaactatccggttggatgacggtgcccttctccaccctcttctcccaggatgggtgggcagcccgccgccggccgggtcggaggtgtttatcgggcggctgccccaggacgtgtacgagcaccagctgattccactgttccagcgcgtgggccgcctctacgagtttcgtctgatgatgaccttcagcggcctgaaccgcggcttcgcttacgcccgctacagctcgcggcgcggcgcccaagccgccatcgccacgctgcacaaccacctgctgcggccgtcctgcccgctgctcgtgtgccgcagcaccgagaagtgcgagctgagcgtggacgggctgccgccgggcctgagccaccgcgcgctactccgcgcgctgcagccgctgggacccggcctgcaggaggcgctgctgctgcctagccccgggccgacgcccgcacagatagcactgctcaagttcagctcgcaccgggccgcagccatggccaaaaaggccctggtggaaggtaggactggagaccgcgggggaccgattggttgggagcaaacactatgccgggcactttacctgtacaggtcagcatagttcaaaaagcgggttaaagaggctagagcttagggtcaaatttgagacagactatttggcctcacgtttttatatttttactggtcctaccagctatcagtgacctaaacgtaacactttccatgcattatttcctgacttaaccctcctcacggtaatgaaacaaaacgttggccctcttgagattggagactggtttaagaaaaattgacttgccggaggcaatcaactgagcttaccttttacacattgtagaacctgcttcctgagactgagaataattaaacagcttttagcacattcttttgttcttggcaagttcttggcaagtattcatggtaaagtttagctattatgatggttatgaggtaggcaaagcctgccatcaaccagtaccccaagggaacttagaaggtagcagttattaggtccctttgtaaataaacacagtgaagcctggagaagttatttaactttaagttgcctggggtcacaggcttccctggtggctcagtggtataagaatccaactgccagtgtgggagacacaagagacaggagtttgatccctggttcagcaagatcccctggaggaggaaatgaccaccactccagtattgcctgggaaatcccttggacagaggagcctgctggactacagtcagtggggttgcaaagaaccagacacaaccaagcatacacacatgcacacttgggtaccaccaccaggaaatgggaaggttagaaattaaataggcttatgtgactccaggggcttccctggtggctcagatagtaaagaatctgcctgaagtgcaggagacccaggttctattcctgggtcgggaagattccctggagaaggaaatggcaacccactccagtatctttgcctggagaattctgtggacagaggagcctggtgggctacacgccatgaggtcacaaagagttggacatgactgaccaacgaacagattaaaaagatgtgactccgaaggactgagtctgggagtttaggcccggggcttagacctaccctgtttgtctttttcctgcagggcagtcccacctctgtggagaacaggtggctgtggagtggcttaagccagacctgaagcagcgactccgccagcagctcatgggtacctcgctacagtgcctacagcctgagggcaaccgattagccctggccagggaccaggggctcgagttccaagggtctcaggttgccttgcagctgctgtgccaacggatgaagctgggcagcccagtgttcctcaccaagtgtttgggcacaagccctgctggctggcaccgcttctggtaccaggtggtgatccccgggcatccggtgcccttcagtggcctcatctgggttgtgctgaccccagatgggcaggatgggcatgaggtggctaaggatgcagtatctgcacggctgctggaagcaatgagtgagtctagggccagcctcctttggtctactggggctgaggcaggaggtaccatggttcaacagtga

SEQ ID NO: 54 - protein, 355 aa, Bos taurus
MQSKRECELWCERVNPENKAALEAWVRETGIRLVQVNGQRKYGGPPPGWVGSPPPAGSEVFIGRLPQDVYEHQLIPLFQRVGRLYEFRLMMTFSGLNRGFAYARYSSRRGAQAAIATLHNHLLRPSCPLLVCRSTEKCELSVDGLPPGLSHRALLRALQPLGPGLQEALLLPSPGPTPAQIALLKFSSHRAAAMAKKALVEGQSHLCGEQVAVEWLKPDLKQRLRQQLMGTSLQCLQPEGNRLALARDQGLEFQGSQVALQLLCQRMKLGSPVFLTKCLGTSPAGWHRFWYQVVIPGHPVPFSGLIWVVLTPDGQDGHEVAKDAVSARLLEAMSESRASLLWSTGAEAGGTMVQQ

SEQ ID NO: 55 - DNA, 10289 bp, Mus musculus
gtaaagacgctctggttgttaaggcgacttgtcccgcctcctggggactcttcaccgcttcgtgattggactctagtatcaaggaatcccggcgtgggccgcgcgagggaaaagatggcggcgatggcagtcggaggtgctggtggcagccgcgtgtccagcgggagggacctgaattgcgtccccgaaatagctgacacactgggtgctgtggccaagcaggggtgagggccggacttccgccagaggaatgcgggatccaaatttgggaaacaaggagggcagactagtcccctgcagggggtgagggcttgagacaccattactccttgagtggggaagacttcggccctaagaacgagaggatgaaactctgggggcggggggagggggcgcgtgtggtcactgagttaaaaaatcaggggagttctagggtaaaaattaaaagggacgcacagtcattccttctctagggccttgaagactgggattatccgagagtagagaagtataaagaggcaatcgagagaagagtttaatctggcttggggaggcatgggcagtgttgggtcaagtctaactttgacagtcctggaaagccagtgaagtcagggaagaaagaagctacttggcttggatttccatttctcgtttatcttttcatgattgtgttttgggaagaaattggtgcacagtgtagtgaaagtgatgtgccccaatatgggctgaactccgtagcccgtgggggtgactggtggctttatggaactgtgcaaaatcaaaatattaaacctagttggttggatctctgggccctcactttacatgatgcttctgggtctgtcgcggttgtaggtttgatttcctctgcatgcctgtcttccacccgcgtttcaagagggagttcattcaggaacctgctaagaatcggcctggcccccagacacgatcagacctactgctgtcaggaaggggtagggaccatcccctgtgccccttaattattagaggcaggaatatcttctgctttataggacttaattctcctcctcctctgacttggttatctattggttagcccctatgacatagagaactcttttttttctttcctttctaaaagttgtagtcccctattcttcatcaggctatccctatatcagagacaaaaagtcttgtctttcatctctactctttattctctgctgagaactagaaattgatcaagaacatgccaactcccattgagtctttgtcttctcttgggttggggatgcagactggaatacgctaattgtgggaaagctttctccatggattcatccagactcaaaagtggagaagatccgaaggaactctgaagcggtaaggcagtttaatttcttcgtgggatccctttaaaggttaggcctggcctgggtgttggggcacctatctgcaatctcaagcgttgtgaggttattcccacatcaggaagataatgagggaggattgagattccatgccaggagaagaaaaggaaaaaattagttctgtcactaaactaggtcaggagagtaagctggtaaatcagagtccatctaaaagtgtctggaacgataggtgatggttcacatctgtaatctcagcagggtccatctccagcccagcaaatcactgagttccaggctagttagggctgtaatctaagaccctgttccaaaagggtttggttctagctcagtatggcagcttatagctgtaatacagacactcaggagagtgaaccagccgggcatggtggtgcacgcctttaatctcagcacttgggaggcagaggcaggcggatttctgagttcaaggccagcctggtccaaaaccaaaaaaaaaaaaaaaaaaaaaaaaagggagagtgagcgaggtcagattcaaagtcaaactgagttatatagagaattccagaacagcctgggctacagtgtcagagccagtttctgctgctccctaccctaaaaccctagctcttaattgttttctcttgtcttgtgtttcaggctatgttacaggagttgaattttggggcatatctgggtcttccagctttcctattgccccttaatcaggaagataacacgaatctggccagagttctgaccaaccacatccacactggccaccactcttccatggtatgactgagggttctttcctgctctgtatcatgatagctgtcccttttgcctagttacactcccagtgcatttggcagaattgaaatgtcagtgttgttcattcctgactccgcctaagtgtggtgtgcagaatgtttcagagcagtatatgtggggctagagacgtcgctcagtggtagatcacttgcctaacatacgtgagcctctgggaacaaaggatagagaaataaattatttctgtttaaaataaaagacaagctaggtatttacacaaggatacgtatgacatattaaacacgtgtaatcacatttagaaaagcatataaagagattaacttgtgaacttgagggaagctttctggacctgatgagtgtgaaacagggttttaacagggtacctgttcatatgcagttctggatgagggtacccttggtggccccagaggacctgagagatgatgtaattgagaatgccccgactacacacacagaggagtacagtggagaagagaaaacatggatgtggtatgtctccttttgctgctgtactgcgtggggtggggtgagggctatggggaactggtggggcgtgttcttgagttataggtcatatgcccctaacaggctctttctttgtttctgattctgggcaggtggcataactttcggactctgtgtgactatagcaagagaattgcagtaggtaagtccacaagggttctgagatatgagcggcctcctagaaatgagaatcaacaggctgggcgtggtggcccaccacctttcattccagaacatgggaactggagacaggtagatctctgtgagtgtaattaaagctagccttgtttatatagtgagttctaggatagccaggactatgtcgacagaccctgtctttaaaaaaaaaaaagaaagccaagcagtggtggcacacgcctttagtccctgcacttaggaggtagaggcaggcaagtctctacaagtctgaggccagcctggtctacagattaagttccagggcagttaagcctacacagagagaccttatctcaaacaaaagtaagaatgggcagtttagaacgttccaggacagtcagggttacacagaaagaccatggctttaaaaagaaaaattaacagtttcgggcctggagagatggctcagtgtttaaaagtgcttgttgctctatttttgaggatcaaagttgagataccaggacccacactgggttgctcacaactgcatgttaactctagctccaggagatctggtgccctcttctggcctccatgggggaactgcacacacatggcacatatacagaacacacacatatgaataaaaatgaatgtaaatattaaaaaaaaaaaacgaacaatttcatgaggctgggggtgtagctcagttggtagagcacttgcttgtctagatgcatgaagcccctaagtagatccatagtacacatagatgtagtggcatatgcctgcagttccacctcttaggaggtggaggcaggaggatcaggagtttacagaaagctcagtgctacattgggttacctgagacccactctaaaaatagaaccagccctggccattctgttttcatattcctttagtccctgaacatgggacgcagaggaaggtggggctctgtggctcctaggccacccaaggctatacagtgagaacctgtctgagaaaaggagaacaaagtgagttccatgtgtgagctgggtattttggctgctttccctgtgctcaacagaagggaaaaaatttgcaccaggtaaggtgggctccctgctcagcaataggtgtccttttccttcctctgtgtagctcttgaaattggagctgacctcccgtctaatcacgtcattgaccgctggcttggagagcccatcaaagcagccattctccccaccagcattttcctaaccaacaagaaaggatttcctgttctttctaaggtgcagcagaggctgatcttccggctcctcaaggtgggtggccgtatggtttcagggtggcccgacggacttaatcactgaggacgtctgcttctgggacagggacagatgattgtgttcttcatggttccttttccagaacttcctctggtttctggagaaagagccaaacttcacaagaatttttttttcccctgagacagggtttctctgtgtagccctggctgtcctggaactcactctgtagaccaggctggcctcgaactcagaaatccgcctgcctctgcctcccaagtgctgggatcaaaggtgtgcgccaccactgcccagcaaggaattcttacatagttaaagtaagagactgggtgtgaggacacacagctttcatcccagcaccaggaggaagaggcaagtagacaagtcagggatttttatctcaaaacaaacagacaagaagttgagggtccttgtgcccagggatggccaggaatgttaagcatgcaggagtgttttgtttttttgtttttaagggaaggaagtataacctgtgttttcatccagaaagctgagaattgatgatctgtgttatctgaagggccagcccataagctcccacaaccaggactggaggtggctgttagcccaaatgacctctcagctctttgtctggccaagaccacactgatccttaagctagtccttgtagcctatctctaaacccatgtacctggagctgagttttgatacatttaagctttctcgtgcaccagggattgtattacaccagggaacttcccaccaaactgtactgtgtttaaacatgctggcaataaactgcctggcatcacactctcaagtttggtccagcctaggtcaggatgcactgagttctcattgtcacattgccatggattatttcctgctcctgtgatgcctacagggaccccaccccctcctccacccccaccctcacccacacttgtggacctttgtgttagcatatgaggactttataaatttatgaaagccctgccttttttggtactgggacagatgctgggcagctgttggtatgggttttattttatgttggggcttttggttataaagtataatgtctgagaatggtggtttgtgggcttgctctcatgctctgacttttcacacagttggaagtgcagtttatcatcacgggaaccaaccaccactcagagaaggagttctgttcctacctccagtacttggaatacttaagccaaaatcgccctccacccaatgcctatgagctctttgccaaaggctatgaagactatctgcagtccccactccaggtaggtgtggagagcactactggtgacagaggggaccacagagatgactaagagctcagagcccaggcttctcgtcccggggacttgtatttggttcctagcactcacatggtggctcccagctgtaactccagctccagaggaccaggtgctctcagtgccttctccccaggcactgcctgtgcatgtggtgcacagacttacacgcaggcagaatacccacgcacatacatgtttttaattgaaaagtcaatagtaattgtaataatacccagacataggaccaagaaatatctcttaagagtagatggtccaggtgggtcctaccgaaattcaggaagcaatgggaaatttttgatgtcttggccatttgccaaatactggccaacttgttcttctgtctcctctgtcagcctctgatggacaatctggaatctcagacatatgaagtgtttgaaaaggaccccatcaaatactctcaatatcagcaggtatggtgttggcttccgcggggcaaagcacagggccaggataaggtcagtaaagaagggctcacagctgtgaggttttctgtctttcccctcaggctatttataaatgtttgctagaccgagtaccagaagaagaaaaggagaccaatgtccagtgagtactgtccttttgttcccaggggctggtgcgcctgcccgtccctctgctcagtctgcttgactttgcccttttccttagggtacttatggtgctgggtgcaggccggggtcctcttgtgaatgcgtctcttcgggcagccaaacaggccgagcggcggatcaggctgtatgctgtggagaagaaccccaatgctgtggtgacgtgagtagcaacttgattgctgggcagcttgtcctggtccccgtttccagccgaagtctttcttactctgtcacctctgatttcaggctagagaactggcagtttgaagaatgggggagccaggtgacagttgtctcatcagacatgcgggaatgggtggctccggagaaagctgacatcattgtcagtgagcttctgggttcctttgccgacaacgagctgtcacctgagtgtctggatggagcacagcacttcctgaaaggtttgtccaggttggggggaaaccatatggctgcgaactgctgcttgctagagtcaaaaaatctacaagtagccgggcgtggtggcgcacgcctttaaacccagcactcgggaggcagaggcaggcggatttctgagttcgaggccagcctggtctacaaaatgagctccaggacagccagagctataaagagaaaccctgtctcaaacaaacaaacaaacaaaaaaaaaatctacaagtgagctggccagtggtagcgcacgcctttaatcccagcacttgggaggcagaagcaggtgggtttctgagttcaaggccagcctggtctacaaagtgagttccaggacagctagggctgcacagagaaaccctgcctcgaaaaacaaaccaaaccaagccaaaacaagatctgcaagtgggtggactagagattccctagggtctgtgggctcggaaggtatctgtggagcatttatctgaaatgaggctctgggtgtgatcgctaccttgggcttaatgtttgttgggaactttatggggtgctgtgatccccactgggttagagtgcagtcagaccttgcctagtgatgctcggcagcagcagcgggctgtgtgtgtgatgtggtcccacaggattgtgtcagcaggtacctcgtagtcctcttagtttgtgtaaggactattgttttcacagagctgggctctaatagcccagagtgtgttctgttgctaaacagtgcatggctctatgttggtggtttttacctttaacctatggctctaacttagtaagagtgggattcctgtgacccagtagcctgtgctccggccgtgtccatagcaaccttggcttgttccggtctttgagccttcagctgctgtaaaaacgccatttccctccttctgggaactgatttgaccctgtggctgtgcagatgatggcgtgagcatccctggagaatacacctccttcctggctcccatttcttcctctaagctgtacaatgaggtccgtgcctgtcgggaaaaggaccgcgatcctgaggtaaagagctgcttttctaggaggggctattctttagtcttctctactgtcttcctctgaagtcgatgaaggtggaagagaagctgggggtgaagaaggtggttgaaataaagcggtgttcttgtttgtttctttggtgctggagccccagcgttctctgtctatctcctgaagttgttgttttctccctggacaggcacagtttgagatgccttatgtggttcggttgcacaacttccaccagctctctgctcctaagccctgctttaccttcagccatcccaaccgaggtaggttcacgcgtggctcttctgaccgagctccccgcgtctgcagctctggccctccagtgctagagcttattcaagtttgccgagtcgctcaggggttttggccccttgtcatccatccaccatctttcctgacagatcctatgattgacaacaaccgctactgtaccttggagtttcctgtggaggtgaacacagtgcttcatggcttcgcaggctactttgagactgtgctttaccgggacatcactctgagtgagtgtctgggacagtgtatgagcgcattagcatgggtgactctggttcggcctgcatgtctttgggggctgtttcacaaagcttcctctgttcctccatggcttgttagctgagtactagccgaggttagctgagtactagctgaggttagctgagtactagctgaggttactgccagtcccaatccagcacagtagcttactggggaggccagagtccaggagtagaggtctttggttcttcatttttatgaccacagaagagactcttctcaacgtagggaagagggaaaggggagccctcaaggtttcattactttgtctccacaggtatccgcccagagactcactctcctgggatgttctcatggttccccatcttcttccccattaaggtaggagtcacctctaagacggtgggtcgagggacaacttgtgccagtggtgttcttctcctgtccctcagctagttggctgtgacccatgttctgttctgtcacttgctctgcagtcctcttggggatacccaagtaagctacctggactccccacatctccagcctctcttgtccagtctttacctggaagagggatgaattttacattatttgagtttgcctttctatctaagcccctcagcaccttcccactgccctcaggtgagagctggcttggtgggttggcttccagttctctctgctttgcctgtgaggttccttgttcatgtctccaccctgctaactgccctaggtttcctggaatgtctctaccatcaggccattttcctgacctccaagaataggccagcttcctcttgagtgctttcatggctcccttcctgtacagtgtttactgtgtccttgtcactgtccgggggttccatattttgacaggatagctaacttttatgagagtcaatatatatttttttaaaatttatttatttattatatgtaagtacactgtagctgtctttagatgccccagaagagggcatctgatttaattacagatggttgtgagccaccatgtgattgctgggatttgaactcaggacctcaggaagagcagtcagagctcttaaccactgagccatcactccagcccccaaggggcagaatattttgttgtatttatcttttgtttggtttttgagaaagggtttggaattatagctcaagctggctttgaaatcctgattctcctgcctcagcgtcctgggtgttgggttataggtttgtccctacacttggctgtttattgtctaatctctgtctgtcccaccatcattgccaagtacaattcctcattcaagccgcctgtgtctttcgtattacagcagcccatcacggtgcacgaaggccagaacatctgtgtgcgtttctggcgatgcagcaattccaagaaagtgtggtacgagtgggcggtgacggcccccgtctgttcttctattcacaaccctaccggccgctcctataccattggcctctagccctgcacacagtgtcaaaaccttggaagcagctctgagttctcttcctacagcacagaaggtgtagaacatctgctggttcagttcctcagtgagaccctcagccgccagagaggagcggttccggctgctttcctacctaatgtcatggtggccaacgggtaggcattcccggactgccaggcatggtggtgcatactctttatcccagcactccagaggcagaggcagaggcagatggatctctttaagttcaaggctagcccggtctacctagcaagtttcaggccacctagggctacatagtgagaccctgtctccaaaaaacgaaaaaaaaaaaaaaaaagaactagaggacacaagccagcagcagtcttcagagcctctggcttgggcatgagaactcagcagctctggatgaagcaacctcagcagatgctcagccgccagagctccccaggggtcaggagagaaagcgaaggctgtggaagagcccgggctgcgtgcatgaacacttgacctgcgctcttcttgccctactctgttgttgtttgggtggtttgtgtctgaaggaaacaaataaagtgaagttacggcctctgctgctttaccc

SEQ ID NO: 56 - protein, 637 aa, Mus musculus
MAAMAVGGAGGSRVSSGRDLNCVPEIADTLGAVAKQGFDFLCMPVFHPRFKREFIQEPAKNRPGPQTRSDLLLSGRDWNTLIVGKLSPWIHPDSKVEKIRRNSEAAMLQELNFGAYLGLPAFLLPLNQEDNTNLARVLTNHIHTGHHSSMFWMRVPLVAPEDLRDDVIENAPTTHTEEYSGEEKTWMWWHNFRTLCDYSKRIAVALEIGADLPSNHVIDRWLGEPIKAAILPTSIFLTNKKGFPVLSKVQQRLIFRLLKLEVQFIITGTNHHSEKEFCSYLQYLEYLSQNRPPPNAYELFAKGYEDYLQSPLQPLMDNLESQTYEVFEKDPIKYSQYQQAIYKCLLDRVPEEEKETNVQVLMVLGAGRGPLVNASLRAAKQAERRIRLYAVEKNPNAVVTLENWQFEEWGSQVTVVSSDMREWVAPEKADIIVSELLGSFADNELSPECLDGAQHFLKDDGVSIPGEYTSFLAPISSSKLYNEVRACREKDRDPEAQFEMPYVVRLHNFHQLSAPKPCFTFSHPNRDPMIDNNRYCTLEFPVEVNTVLHGFAGYFETVLYRDITLSIRPETHSPGMFSWFPIFFPIKQPITVHEGQNICVRFWRCSNSKKVWYEWAVTAPVCSSIHNPTGRSYTIGL

SEQ ID NO: 57 - DNA, 8664 bp, Sus scrofa
tgtgattggctgccagtgtcagggaatctcggcgtggactgcgcgagggaaaagatggcggcgatggcggtcggcggtgccggtggaagccgcgtgtccagcgggagggacctgaattgcgtccccgaaatagctgacacactgggggctgtggccaagcaggggtgagggcctggacttccgcgaacagaatgcggggtcggaactcggggactgagaggggcagaccagtcatccctgggaagcaggggtgagggggtcggagtggataagattagggtgggagaaaccgctagtccatgtagggagaagcctccggccctggagcgtaagagaaagagaaagaaagacatattgggaacgtgtggtccctgaaccccaaagtcgagagagttatcaggtaaactcaaaaagagggcgtacgacctcaagggccctggagagcgaggtgcgaggttcttgtctcagagtgggaggaagtgttatggggctagggagaggagagatgaaccttgagggctgaagcctgggtagtactggagcagatctggatatgacagtcttggaaaatcagtgacaacagagtagaaagtccacgtggcgtggattttcatcttttctcttttctcatcttttccatggctctgttctgggaagaaattgaggcacaacgcagtggaagtgatattccctaaaatgggccgaattcagcagcccattcgagtgactgactaatggcagctgaaagggttgtgcagaatggagatagcctagtccaattgcttggatcgctgggcactgctactctctttacatgacgattctgggtctgtcgtggttgtaggtttgatttcctctgcatgcctgtcttccacccgcgtttcaagagggagttcactcaggaacctgctaagaatcggccgggtccccagacacgatcagacctactgctgtcaggaaggggtagggaccatcccacatgccccttaattattagaggcagtaacaacttatgttttatcagtgccttcttcctcttcctttcttgacctggatgtatttgttcaaccctgggatatggataactcttgttctctccttgcttactgctcaaagccttagtttcctattctgcatcaggctttcctgtatctgtgatagaaaaagccttttgtctctcatctctactattccctgttaagaaatagaaattgaatgcataaagtgctgaacctcactcagtctttgtctttcttgggttggggagtgcagactggaatacactaattgtgggcaagctttccccatggattcgtccagactcaaaagtggagaagatccgcaggaactctgaggcggtaagactgacatcttcaccgaatctttctaaagatcagatctgtaaacaacctggatggggagaacagatttttcccctccataacttagtaaatctgatgtaatgcacttaaagctgtttgaggagttccccttgtggcttagtggttaatgaatcaaactagcatccagtgggggaaaaaactgtaactgcaatgtatacatctaaggatgacctgacccccttgctgtacagtgggaaaataaaaaaaaaaaaaaaaaaaaaaaactagcatccatgaggatgaggacaagggttcagtccctggccttgctcagcgggttaaggatccggcattgccgtgagctgtggtgtaggttgcagacatggctcaggtcctgagttgctgtggctgtggcgtaggccggcggcttcagctctgattggacccccagcctggaaacctccatatgccgtgggtgcagccctaaagagacaaaaaaaaaaaaaaaaaaaaggttgtttgagttgctagctcttaactttgcctcttgttctccattctaggctatgttacaggagctgaattttggggcctatttgggtcttccagctttcctgctgcccctaaatcaggaagataacacaaacttggcaagagttttgactaatcacatccacactggccaccactcctccatggtatggctgagggcctcctttcctgctgcacattatggtagtcaggctgtgctaaatatcttcttttcctagccattcagtaaagggtgcattaggcagaatttaaatgtcagtcctgcctacccacaactaaaagtggtaagcagagacttataaaatacatagcatattctattatctccagaaacttataataaagtaaaagacagggcagatacttacataaggatgtacacgagatacgtgtgcacatacataaaatcacaattgggaaaagcatgtaaggggattaagttgaaatctagatcaagatctttttatttatttatgtttaagcttttttttttgtcttttcagggctgcacctgtggcacatggaggttcccaggctaggagtcaaatcagagctgtagctgccggcctacaccatagccacagcaacgccacatctgagccgtgtctgcgacctacaccacagctcatggcaacatcaggtccttaacccactgagggaggccagggatcaaacccacaatcttagctcttagtggttcttagtcggattcgtttcccctgtgccatgacaggaactcctggatcaagatctttttaattgaaagaagcttctggacccaatgagttcaaaatagagttctaaatagggcagagaggtgttttcttgtggcgcagtgggttaagaatctggtgttgtcgctgttgcggcttgggttattgctgtggtggggtttgatccccagcctggacacttccacatgccaagggcacggccaaaaataaattaattaattaattaaggtacagaagctatttattgttcatgtgcagttctggatgcgggtgccattggtggcaccagaggacctaagagatgatataatcgagaatgcaccagcatcacacacagaggagtacagcggagaggagaagacgtggatgtggtatgtctccttctgctgctgtgccagggcaaagggtagggtgagaggaagtacagggtgggccctgcaggagggtctccttgaggtatggtggttggtgggctatatatatttgactgtattttcctgtgtttgactgaacaggtggcacaacttccgaaccttgtgtgactatagcaaaaggattgcggtgggtaagtccatgaaggtcctggcataggttgtcctttgaccttctgtgatgaagaatcgggaatttcgtgtatatgtgcttgctcctttccctgtgcctcagtctgccttgtcttgagaaaaatagatcttgcacaaaagagcaaggagagacttctggcttatcagtgactgacagatattttcccttgtgtagctcttgaaattggtgctgaccttccatctaatcatgtcattgatcgttggcttggggagcccatcaaagcagccattctccccaccagcattttcctgaccaataagaagggatttcctgttctttctaagatgcatcagaggctgatcttccgactcctcaaggtgtgtagtagaaaggttctaaacgtgctccagctactcttcttgctgccttattcacacatatatgtatgatggatttttttttttttctctctctgtggggctaactcttttcctttctaatttctggagagcaatttcagcaaagttgggggtcttgagagcaaaaagacaaatagcagtaggaggcccagaaatatttcaaaaggaaccaggtctcatgagaactttgcagaaagtttcatttaagaagttacaacaaggagccatgggccaggatgatgcttatgtggcataggagggtttgtgctgcttttgttgttatttggaggtatttgttggaccagagaactgctgatctgggccatattttatgctagagctcttcgcccacaaaccataataatatcctcttggtttaaagattgtgtctgatggtctgacttatcctcgcagttggaggtgcagttcatcattacaggcaccaaccaccactcagagaaggagttctgctcctacctccaatacttagaatacttgagccagaaccgacctccacccaatgcctacgaactctttgccaagggctatgaagactacctgcagtccccactccaggtgggtctggagtgcactgagaggagggaggtggcggacggaaatgtctcctgagagcaggtgcctgaaaatcctgacaaagctcagggagcagtgggaaggctttggtactctggtgcactgtccttgctagaaactggctcacttactttctctttttcatttcatcagccactgatggataatctggaatctcaaacatatgaagtgtttgaaaaggaccccatcaaatactctcaataccagcaggtatagtgtggatctcagattggctaggatgacctgggtgaggatggcattacaaccatgaggtcttttctcttcccccaggccatctataaatgtctattagaccgagtgccagaggaggagaaggacaccaacgtccagtgagtgctctccccatgagcccagagctttgcatgcctgtgtctctatatgccgagtcagcttgactcctgtctctttcatagagtgctcatggtgctgggagcgggccgggggcccctggtgaatgcctccctgcgggcagccaagcaggctgaccggcggataaagctgtacgctgtggagaagaacccaaatgctgtggtgacgtgagtagcaacctccttgttggcaagtttgtccccagtgccagtttttcttagctgtgtcctcacttgtatcatctctgttttaggctggagaattggcagtttgaagaatggggaagccaggtgacagtagtctcctcggacatgcgggaatgggtggctccagagaaagcagatatcattgtcagtgagcttctggggtccttcgctgacaatgagctgtcacccgagtgcctggatggagcccagcacttcttaaaaggtgcctctaggctggggtgtattgcataaggggactggattatcagctgggaaggtgggagcgggttggggagggatgggtgtggcagtagcctagaggaagctgcaaggtttaggggaagcggggaaggcgggtagacttggggcaggagccttagcaaatgaagcagtctctctgaacctaggtgttcacgtctgtaagatgaggggaggaccagagcaaagactcaatctgaggtctgtgaactccctgagctgacatgatatgtaccttgggcttagctttcatcaggatctcagaggactttgtattaagagagttaagaacctctagactagaagaccttgggttccttccaactttactcttgtgtgactataaattaacctagaagtggaatcccccaggacaaggagtagggagcaggtcggcctgagaatgtgacaacacgaaactgcttgagtcttttgatgtgggaggtctgggccttcactgagtacagatacactgtttctagcccttgggaagtaatgtgaccttctgctctgcagatgatggcgtgagcatccctggggaatacacctcctttctagctcccatctcctcctccaagttgtacaatgaggttcgagcctgtcgggaaaaagaccgtgaccctgaggtgaggccactctcttcttcttcttcttcttttttttttttttggccatacctgcggcatgcagaagttttcaggccagggatcaaaacgaagccacagcggtgacattgctagatccttaatccactgagccaacagggagccattctctcttggaggactcttctctctttagtccctttctttttctatattagcataactgttttcttccactggagaagatgaagaggtgaaggaatagtcggggatgtgggaaaatagtggaagtggaactatgttgtgatctttagtccccgaagctggagctgtagtccctgaggtaatgagtagcccttgcctgtcttctccagctcttgctctctctcttgggacaggcccagtttgagatgccttatgtggtacggctgcacaacttccaccagctctctgctccccagccctgttttaccttcagccaccccaacagaggtgggttcctacatggctgtcctctgatgggaagggtgagaggttgccctcctggtttcttcccttgctgtcctgggtctgctctatccggcctctatctaggcttcctttcctgatcctgctcatgctttaccgagaggtctatggcatctggcccctcttcacccacacagctcttccctgacagatcctatggttgacaacaaccggtactgcaccttggagtttcctgtggaggtgaacacagtgctgcatggctttgcaggctactttgagacggtgctttatcaggacatcactctgagtgagtgtctagggcagtggatggggtataagggtatgctacctgggcagcttatgtacatgtttctttaagagtaataggaatcagtgaatggggatctttgattatttgttctgtgttcacagaagacacttctcagccaaggcaaaaagcagagtcacagagatctcaatttttaaaatgactttgtccacttaggtatccgtccagagactcactcccctgggatgttctcatggtttcccatcctcttccccattaaggtaagaatcacttttaaggctccttggttaaagggtaactgctgtctttggtgttttgcctcttcctttctgccagaacgatgcttgaccatgacccttgttctgttgctctcgtgctcttggatcctgttgcagatgttgggctatctgcaatggccttccacctggctttcccacatctgctctggctattcttctctctgttctccacctcaggaaagagtcagtctttttaaaaaagtgaatcagatcatatctgtctccttttttttcttttgtctttttgccttttctagggccactcctgcagcatatggagattcccaggctaggagtctaattggagctgtagccgctggcctacaccagagccacagcaacgtgggatctgagccgcgtctgtaacccataccacagctcatggcaacaccggatccttaacccactgagcaaggccagggatcgaacgtgcaacctcatggttcctagttggattcgttaactactgtgccactacgggaactccatctgtctcctattttaaaacctttcaatatcttctgcactgatgtgaagataaaggtcttacatccttgggagttcccattgtggctcagtggtaatgaacctggctagtatccatgaggacgtgcgtttgattcctggcctcactcagtggtttaaggatctggcattgctgtgagctgtggtgtaggtcagttgcagctcaggtcctgcattgctgtggctgtggtgtgggctggcagctacacctccgattcaacccctagcctaggccctagcagatgcagccctaaaaggggggggggggcaaaaaaaatcccagtaaaacctgtatattatagagtaaccatttttttaaaaaacggtcttaaatccttattagatggtgtgctctagtttttgcctgccttttcagttattgtccccttgattacattgcttcagtcctatggaccttctttcagttcctctaatactccatgttctttcctgcttcaggttttcacacctttgtcctttgcctataaagttctttgttcatttcttgacccagctaacgtatctcccaggtctcatgaaacattcctattgtcagataactttccctgactttctagcctaggttagcgctacctttcatagatgcctttatagcaccccatccctgttcacagcattcatcccactttttattatttgttcagtgtctgttctgttctgattatttgttctgatagacctcaaataaacctcatgagggttggaacatcacgtttgatcattttctctccacacctagctagctacattgccacataaaattgattagctccaccctgaactcccctgtctttcttcttacagcagcctattacagtgcgtgaaggccagaccatctgtgtccgtttctggcgatgcagcaattccaagaaggtgtggtatgagtgggctgtgacagcacctgtctgttctgctattcacaaccccacaggccgctcctacaccattggcctctagccctgcctgcaagtgtctaaaaccttagaagcagcttcaggttctactcctgtagcacagaaggtgcagtacaccatgggttctgatttgccttgcccatcagagaggagcatttcagtcagctttcctaccttaggccatgggcaaagggtgagaattgcagggcttgcgctgccaacctgtgaagacctctggctaaggcatgaggagtttgtgctggatctgaggctgctccaacaggcactcagcctcaagtgctccctggaatagccctgagaacatgtggattgaacaaattttcagcctttttccctgcccatctctgttcctgttttggtggttttgtgtaaggaggaaatacaaataaagtgaagttatggcctttcctgctccaa

SEQ ID NO: 58 - protein, 637 aa, Sus scrofa
MAAMAVGGAGGSRVSSGRDLNCVPEIADTLGAVAKQGFDFLCMPVFHPRFKREFTQEPAKNRPGPQTRSDLLLSGRDWNTLIVGKLSPWIRPDSKVEKIRRNSEAAMLQELNFGAYLGLPAFLLPLNQEDNTNLARVLTNHIHTGHHSSMFWMRVPLVAPEDLRDDIIENAPASHTEEYSGEEKTWMWWHNFRTLCDYSKRIAVALEIGADLPSNHVIDRWLGEPIKAAILPTSIFLTNKKGFPVLSKMHQRLIFRLLKLEVQFIITGTNHHSEKEFCSYLQYLEYLSQNRPPPNAYELFAKGYEDYLQSPLQPLMDNLESQTYEVFEKDPIKYSQYQQAIYKCLLDRVPEEEKDTNVQVLMVLGAGRGPLVNASLRAAKQADRRIKLYAVEKNPNAVVTLENWQFEEWGSQVTVVSSDMREWVAPEKADIIVSELLGSFADNELSPECLDGAQHFLKDDGVSIPGEYTSFLAPISSSKLYNEVRACREKDRDPEAQFEMPYVVRLHNFHQLSAPQPCFTFSHPNRDPMVDNNRYCTLEFPVEVNTVLHGFAGYFETVLYQDITLSIRPETHSPGMFSWFPILFPIKQPITVREGQTICVRFWRCSNSKKVWYEWAVTAPVCSAIHNPTGRSYTIGL

SEQ ID NO: 59 - DNA, 8048 bp, Bos taurus
ccccgagacgactttggtggccccaatgatgacacttcaagcttatactacagggcttcatgggacgtgtagtctctgcacggagttctacgagtacacgaagcattatgggagattaaattcgtcgagaactagaccctgagattggtgatttttccgaagcctcgacgtacgtcactgtgcagcccgcggattggcgagaagagccactccccacccctcctcctccagctccagagccgtgggagacgctctggttgttaaggtgaaacgtcccgccttctgggggcttttttccggctttgtgattggctgctagcttcagggaatctcggcgtggattgcgcgagggaaaagatggcggcgatggcggtcggtggtgccggtggaagccgcgtgtccagcgggagggacctgaattgcgtccccgaaatagctgacacactgggggctgtggccaagcaggggtgagggcctggacctctgcgagctgaatgcggggtccgaactcggggaccgagagggacagaccagtcatccccgagaggcaggcgtgagggggtcgaagtggatgagaccagggcgggagaaaccatttagtccttcgggatgagaagcctcgggccctggagcttgagaggagggcgggaaacttattgggggcgtgtggttactgaaccccaaagtcggaggagttatcaggtaaactcaaaaagggggcgtagagacctcccgggccctggagagcgagattaccgtatgaaattgggagaaataggaggttagggagaggagagctaaaccttgaggggggatacttgggcagtactgctgccgatctggatgtgacagtctcggaaaaccagtgacagcagagtagaaagtccacgtggtgtggatattcatcttttctcttaactcatcttttccatggctgtgtcctggcgagaaattgaggcacagtacagcggaagtgatatgccccaaggttggctgaattcagcagtctagtcgggtcgctggtggcagccgaaagggttgtgcagaatcaagagagccagtccaattacttggatctctgggcactgctgctgtctttacatgacgattctgggtctgtcgcggttgtaggtttgatttcctctgcatgcctgtgttccacccgcgtttcaagagggaattcactcaggaacctgctaagagtcggccgggcccccagacacgatcagacctactgctgtcaggaaggggtagggagcatcccacatgccccttaattattagaggcagtaacaacttatgctttatcagtgccttcctcctcttcctttcttgacttggatatattggttcgccccacggatatagataactcgtgttctctccttacctgcctactaaaagccttagttccctgttctgtcaggctctcctgtatctgtgatagaaaaagtctttgtctttcatctctaactctattccctgttaagaactagaaattgaatgagtaaagtgctgaaccttatttagtctttgtctttcttgggtgggggagtgcagactggaatacactaattgtgggaaagctttctccatggattcgtccagactcaaaagtggagaagatacgcaggaactctgaggcggtaagactgacctcttcactgactctaaatacctgtaaacaagctgggtggggagagcactttttctccactctgtaacttagtaaatttgatataatgcaattaaagctatttgagctgctagctcttaactttatccttttaatctctattccaggctatgttacaggagctgaattttggggcatatttgggtcttccagctttcctgctgcccctaaatcaggaagataacacaaacttggcgagagttttgaccaatcacatccacactggccaccactcctccatggtatggcgagggcttcctttcctgctgcatattatgatagtcaggctgtgctaagtatcttcttgttcctagccattcagtaaagggtgcatttgggagaattgaaatgtcagtactgcctacccacaataagagtggtaagcaaagtattataaaacgtacagaatatcagttatttcccgcaacttccagagataaaagacagcatataatcacaacttgggaaaaggatataaggggattagcttgaaatctggatcaagatctttttaattgaaggaagctttctggacctaatgggttcaaaacaattctaaatagggtgttgaacctatttattattcatgtgcagttctggatgcgggtgccattggtggcaccagaggacctgagagatgatataattgagaacgcaccaacttcacacacagaggagtacagtggagaggagaagacatggatgtggtatgtttccttttgcggctgtacctggggtggagggaagtacagagtggaacctgtaggaaggtctccctgaggtgtggtgattggtgggccatatgtatttgatgggcttccctggtggctcagacagtaaatggtctgcctgcaatgctggagacctgggttcaatccctaggtcaggaagatcccctggagaaggaactggcaaaccactctagtattcatgtctggaaaattccatggacagaggagcctggagggctacactccatggggtcacaaagagttgaacacgactgagcaactaacttctgtgttttgactctgcacaggtggcacaacttccggaccttatgtgattacagcaagaggattgcagtgggtaagtccacaaagatcctgggataggttatccttctctgaagtcctgtgactaaaaatcaggagtctcatgtatacttggctgctggggcatactttctccatgctttagtctgccttccttaaggaggagacagatcttgcacaaaagagcacgcaaagattctggcctatgtgattgacaggtctttgttttcccttttgtagctcttgaaattggtgctgacctcccatctaatcatgtcattgatcgttggcttggggagcccatcaaagcagccattctccccactagcattttcctgaccaataagaagggatttcctgttctttctaagatgcaccagaggttgatcttccgacttctcaaggtgtgtagtggaagggttctaaaggtgttccagctaatcttgttttactcacacatgtgtgatgggatttttttttttttttttttttccctttgtggggctgactcttcctctctaatttctggagcgcaatttcagcaaagctgggggccttgagagcaaaagaacaaatagcagtagaagccccagaaacatttcaaaaggaatcgggtatcatgagaactttgcagaaagtttgatctaagaagttccagcaatgattcatggggtcccttgtgccaggtgatgcttatgtggtataggagggctcttggtgcttttgttggtgttcagaggtatttggtgatctgggccttattttatgctgaagctctttgaccataagcttcaataataccctcttggttcaaggactgtgtctgatggccttacttattctcacagttggaggtacagttcatcatcacaggcaccaaccaccactcagagaaggagttctgctcctacctccaatacttggaatacctgagccagaaccgacctccacccaatgcctacgaactctttgccaagggctatgaagattacctgcagtccccactccaggtgggtctggtgtccactaagaggatgggggtggggggaggaaatgtatcttgagagcaggtaccataaaatctcactggagctcaggggacagtgggaaggttttggtattctggtgcactgtccttgccaaaaagtggctaacttactctgtctttttcctctcattcatcagccactgatggataacctggaatctcagacatacgaagtgttcgaaaaggaccccatcaaatactctcagtaccagcaggtacagtatgggtctcagtatcaggcaaagggctgggatgacctgggtgaagatggcattacagccacagggtcttccctcctgccccccaggccatctataaatgtctgttagatcgagtgccagaggaagagaaggacaccaatatccagtgagtgctctctgcctgattcccagagatgtgcatgcctgcctctctacatgtacagtcagcttgactgctccctctgtttcttagagtgctgatggtgctgggagcaggccgggggcccctggtgaatgcttccctgcgggccgccaagcaggctgaccggcggataaaattgtacgctgtggagaagaacccaaatgctgtggtgacgtgagtggcaaccttgatgctgggaagtttggccccagtgccagtatttctttctcctcctgactcgtttcatctgtttcaggttggagaactggcagtttgaagaatggggaagccaggtgacagtagtctcatcggacatgcgggagtgggtggctccagagaaagcagatatcattgtcagtgagcttctggggtcctttgctgacaatgaactgtcacctgagtgcctggatggagcccagcacttcctaaaaggtgcctccaggctggggtgtactgaataaggggattggattatcaactgggaaggctcctgggttgggcaggggtgggtatggcagcatcttagaagaggttacagagtttaggggaggcagggctgacttgagtcagtgcccttagccagtgacacaatctccctgaacctcgggtgtgggtgttcacatctgtaaaatgaggggagtggaccagagcagaaacttaaaaaatatttatttagtcatttatggctgtgctgggtctccgttgctgcatggacttttctctagtcggggagagcaggggctactctctagttgccgtgcatgggcttctcattgcagtggcttctcctgctgcagtgcacaggctctggggcgcgtgggctcagtagttgtggtacataggcttagttcctcctctgcatgtgggatctttccagatcagggatcgaacccatgtcttctgcatttgcagatggactctttaccactgagccaccaggaaagcccccagagcagagattcttagtctgagatctgtggactccctgaactgccatgacatgtaccttggatttagctttcatcactagctcaaaggaaagaaagttaaggaccattagattagaatactttgggttccttccagttttactcttatgtgactctaaattaacctggaagtagaatgctttagggcatgagcagggggcagggtggcctgggaatgtgacaacatggagctgcctggtcttttttgatgtgggaggtctgggccttcagtacagatacaccatttccatccgctgggaagtaatgtgccccttctgctctgcagatgatggcgtgagcattcctggggagtacacctcctttctagctcccatctcctcctccaagctatacaatgaggtccgagcctgtcgggaaaaggaccgtgaccctgaggtaaagagccactctcttctggcggtctcttctctctttaatgcttttctttttctctgtcagcataactgttttcttccactggaggagatgaagagatgaaggagttggggatgtgggaaagtaactgaagtgaaactacgtttttatctttgtccgtgtcgttagagcttgggctgtattccctgaggaattaggtagtgctcacctgtcttcttcagatatcattttctctgttttggcacaggcccagtttgagatgccttatgtggtacgactgcacaatttccaccagctgtctgcaccccagccctgttttaccttcagccatcctaacagaggtgggttcctgcatggctgtcctctgactgaatggggagctcacctccctggtttcttcccttgctgtcctgggtctatctggcctcttatctaggcttcctttcctggttcctgcttatgctttaccaagctgtctacggtttctggttcctcatcacccacacagctcttccctgacagatcctatgattgacaacaatcgctactgtaccttggagtttcctgtggaggtgaacacagtgctgcatggttttgcaggctactttgagactgtgctttatcaggacatcactctgagtgagtgtctggggcagtggatgggggttgaagagtatgctacctgggcagcttatgtatttaatacatgttgcatttggagtcacaaggaactgagcaatcagtgaatggagatctttgatgacttgtttccatgtttacagatgagactgtcctcaacctaggcaaaaaacagagtcacggagaccttgttttgttgttgttgttaatttttattggaatatagttaaaacaatgttgtgttagtttcaggtgtacagcaatcagttattctcaatttttatcattattttgtccacttaggtatccgtccagagactcactctcctgggatgttttcatggtttcccatcctcttccccattaaggtaggtttcaccttaaggctccttgggttaaaaagtaacttatggcattgatgttttgcccctttcctcctcccaggataacgcttggctgtgacccttgttctgctgctctcacgtgcagttgtagatgttgggatatttgcagtggccttccacctggcttcccacatctacttaggctgttcttctgtccattctgtacctggagcaagagtcttcttttaaaagcacaactatgatcctgtctctctctcctgcttttaaaacccttcaatatctttccagttcccttaggataaagtttgttttggcacatagcatgtgggatcttagttccctgaccagggattgaacccacgctccacacagtggaagtgcagagtcttaaccactggaccaccagagaagtcccaggataaagtcttaaatcttccttagacttggtgtgatgtagttttcacctgcatttgcagctgctgtcctttgtttacattgctcagtccttggaccttcttttggttcctctaataccccatgttctttcctgcctcagggtttttcacacctttgtcctctgcctataaagttcttggctcattttctgacccaggtgactttatcttccaggtcttattagacattcttattgtcagataattttccctgacctcatagactaggttagcattacttttcataggtactgtccctgttcacagcattcatcctacttttgattatttgttcagtgtcagattgttcagttctgattatttgttctgatagatttcaaacttcatgagggttggaatgttacgtttcatcattatctccacacttaacttagtaccttgccacataaaattcattagctccaccctgaacctccctatctttcttcttatagcagcccattacggtgcgtgaaggccagaccatctgtgtgcgtttctggcgatgcagcaactctaagaaggtgtggtatgagtgggctgtgacggcaccggtctgctctgctattcacaaccccacaggccgctcttacaccattggcctctagccctgcctgcaagtgtctggaagccttggaagcagctgcagattctgttcctgtagcacagaaggtgcagtacaccatgggctctgattcgctgtgcccatcagagaggaacatttcagtctgctttcctaccttacgtcaagatggcaaaggagaattgtggggctcacgccaccaatctgtgaagacttcaggcctgagcatgaggaattcatgttggatctgtggctactccaacaggcattcagcctcaaaggctccctgggatagctctgagaacatgtgtattgaacaaattttcagccctcttccctgtccatctctgttcctattttgatggttttgtgtaaggaggaaatacaaataaaatgaggttatggtctttcctgctccaa

SEQ ID NO: 60 - protein, 637 aa, Bos taurus
MAAMAVGGAGGSRVSSGRDLNCVPEIADTLGAVAKQGFDFLCMPVFHPRFKREFTQEPAKSRPGPQTRSDLLLSGRDWNTLIVGKLSPWIRPDSKVEKIRRNSEAAMLQELNFGAYLGLPAFLLPLNQEDNTNLARVLTNHIHTGHHSSMFWMRVPLVAPEDLRDDIIENAPTSHTEEYSGEEKTWMWWHNFRTLCDYSKRIAVALEIGADLPSNHVIDRWLGEPIKAAILPTSIFLTNKKGFPVLSKMHQRLIFRLLKLEVQFIITGTNHHSEKEFCSYLQYLEYLSQNRPPPNAYELFAKGYEDYLQSPLQPLMDNLESQTYEVFEKDPIKYSQYQQAIYKCLLDRVPEEEKDTNIQVLMVLGAGRGPLVNASLRAAKQADRRIKLYAVEKNPNAVVTLENWQFEEWGSQVTVVSSDMREWVAPEKADIIVSELLGSFADNELSPESLDGAQHFLKDDGVSIPGEYTSFLAPISSSKLYNEVRACREKDRDPEAQFEMPYVVRLHNFHQLSAPQPCFTFSHPNRDPMIDNNRYCTLEFPVEVNTVLHGFAGYFETVLYQDITLSIRPETHSPGMFSWFPILFPIKQPITVREGQTICVRFWRCSNSKKVWYEWAVTAPVCSAIHNPTGRSYTIGL

SEQ ID NO: 61 - DNA, 7145 bp, Mus musculus
gccgcctgggtgcctgggagaatagggggtgggtagggtaggaggcttgaggggggaggagcaggacctaccctttaaatctatcgccttgagccgttggccttcagataggctgatttggttggtgtcttgctctttctgtgggaaggctgcggctcacttccttctgacttcttgataattttgcattagacatttaactcttctttctatgatctttccttctagacactgagttttttggttgttgcctaaaaccttttcagaaatcccttccctcgccatcacactgacatgagtgtgggtcttcctggtccccacagtttgcctagttctgaggaagcatcgaattctgggaacgcctcatcaatgcctgcagtttttcatcccgagaactattcttgcttacaagggtctgctactgagatgctctgcacagaggctggtaaggaattcagtccccgaagaacccagtaaattagggtaagagtagaaaaaacgggctgaagggttattgcttctttatgaaccgtagtagtcattaacataagcgggtgtccttatcactcttctggaaacccctctgagtttgaccggtgatacgttggccttctagtctgaaatagagatccgggacacaggacggagcaatataaggctcttgtgtgtatttgagaacctaaatatttgggctctttggaatatgttcgggggcagtgagtggtgtcttcagtagcagggagacctaacatcctagcttggaatgagcaccccatttttttggtgaggttatacagttagtttgcaatttgcccaaatggccgttttctccagcagaagcagttagcatttctctcaacctttgggaatatggatgtcacttagcagttctgggtttgtgagctcagtgctccttccaaaccccaaacaagtgtacacagtttaagtcattcattcttatagctagcatctggagccaaggtctgaagctcattgtctgtacagagtcagcccagtactcaggcttgtaaatggtagaaccaagaggctgctaggctgtgtgtgccacggtgctcaggtgcgtgttgtgatgctcgggtgtgtgcagcgatgctcgggtgtgtgcagtgatgctcgggtgtgtgcagcggtgcttgggtgtgtggagcgctaggaagtgtgtgtccccttttttctgagcttttaagttaatgtctgtcatcttgatttttctgatttatgggttcaatttttgattttttttttgtttgtttttttttgttttttcgagacagggtttctctgtgtagccctggctgtcctggaactcactttgtagaccaggctggcctcaaactcagaaatccgcctgcctctgcctctgcctccctcaatttttgattttggaggtgggaaaagtgctgggttaggaatgaacgggtggggatagcctttgtaagtgatgtgtgtttttagagcatgtgtgtagagcatgtgtgtttgtagtgcgtgcccctagtgccagcagatggcataattttccatttagaagctgctttcagggctgtctacttatttgctagactgcaggctaacctcagcattgccatcagcgtggagcacagatgtcttcagtgtaggaggtgtcttctacctgctgctggatctaggaaatgttggggcaaagcttggtggaggagcacttgtctcttgctgaaggccctggaaaaaaacaaaaaagctaaccgaagagctagagggtcaaggataagagaaacgaatttggttaaccgaaattttactctagtaattaataattaactggaccctctgactggctgctcttgtactagcagaaaagatggtgggatatttttatttatttatttttttaaagatttatttattatatgtaagtacactgtagttgtcttcagacactccagaagagggcgtcagatcttgttacagatggttgtgagccaccatatggttgctgggatttgaactccagaccttcggaagagcagttgggtgctcttacccactgagccgttggatgctcttacccactgagccatctcaccagccccagtgggatcattttaaaatatacctttaaaaaaaaattgggggtggggggtgtctaaactcaggactgtgcattcctaacaacaagtgatttaaccctggaaatttccttagataacattcagtataatggatttcgtcatgacattttttgttcataaatattagttcatccctaaatgttaatgtgtgtgtgtgtgtgtgtgtgtgtatgtatgtatgtatgtatgtatgtatatatgtatgtatgtatagatatagctgactcagtggtagtagagtatgaaaggtcccaacaggattctattcacccagcaccatgcaaaaatctaggcgagataaaagtccccccaaacctgagtctttggataaacctccactcagaaggtagagaggtaggacccagagagcaggccagccttggctacctgagaccctatcccttagaaagaaaagaaaaccacaaacatagactagatcctctgctgcctaagctcttgtgctgtcttgtctgtctgtctctatttgttgagacgggctgatctcaaattctcccatctcagctactggagcaggggggctttagatttgtgctacccactgtcaggatcagaggtttacagtgtagatgcggtcacggttctaatgaagagggagcagggagaagggattggaaagagcagactacaaactcaaacctgtcttcatcctgccattgaactgagtattgtttggttagttgtctttttttttttttaaataggattcccagggtctaattgtataatttaaataactaatgaaacttaaaaacactgtatgtagggctggtgagatggctcaacaggtaaaagcactgactgcccttcccaaagtcctgagttcaaatcccagcaaccacatggtggctcacaaccatccgtaatgagatctgatgccctcttctggtgtgtctgaagacagctacagtgtacttacatataataataaataaatatttagcagagacattcttttttttttttaattaattaatcccatgtggttgctgggaattgaactcaggaccttcggaagagcagtctgcactcttaaccttaaccgctgagccatctctccagccccctaagtagaaacattcttaaaaaaaaaaaaaaaaaaaaaaaaaacactataaaagggagatctatgcaaaatggtgttacccaggggtgacaaagtattccaagaatactttccaaaaattaggtttttcttgttacttagatctatgaagataattgctttgaaagtaaatatagccgggcgtttaatcccagcacttgggaggcagaggcaggcgcatttctgagttcgaggccagcctggtctacaaagtgagctccaggacagccagggctatacagagaaaccctgtctcgaaaaaaccaaaaaaaaagaaaaaaaaaaaaaaaaaagaaagaaagaaagaaagaaagaaagaaagaaagaaagaaagaaagtaagtaaatatattaaatgtaacatttaattatctgggaaaatgatttatttgtttggttggttttgtttttgtttttttggtcagggtttctctgtgtagccctggccatcctggaatttactttgtaaaactgactggcctttttaaaatttatttattatatgtaagtacactgtagctgtcttcagacacaccagaagagggcatcagatctcattacggatggttgtgagccaccatgtggttgctgggatttgaactcaggaccttcggaagagcagtcagtgctcttaaccgctgagccataacccccaccccaccccgtgaactgactggacttaaacccataatctgcctgcttgagtgtcccaagtgctgggactaaaggtatgtaccaccatgccaggctgagaatgtcttatttattaacaagttatctatttatttctaacagcctctcctcgcccttcctctgaagacctgcctcttcaaggcagccctgattcttctaccagtcccaaacaaaagctctcaagtcctgaggctgacaagggccctgaggaggaggagaacaaggtccttgccaggaagcagaagatgcggactgtgttctctcaggcccagctgtgtgcactcaaggacaggtttcagaagcagaagtacctcagcctccagcagatgcaagaactctcctccattctgaacctgagctataagcaggtggggtccttagaagttgctgtaatgtaacacaatgagactgacttgctaatgaatcgaactaacgtctggacgtctctctaactatcctatcctcctatcctatgcgcctgttaaaatcataattatgtgattgattgattgattgattatgtataagtacactatagctgtcttcagatacaccagaagagggcatcagatctcattacggatggttgtgagccaccatgtggttgctgggatttgaactcaggaccttcggaagagcagtcagtgctcttaaccgctgagccatctctccagccccaattatgtgatttatatatttcccagtttgtttcattggttactttatcttctacttcacctcccacacccatccccaaatcagggtctcactgtagccctgactggtctctgtagaccaggctgggagaggttcacctgcctctgtctcctgggtgctggaaataaaggtgtgcctggcttttttcctttcttttcttttttaagattgtttatttttaaattcctttagttcattggtgttttgcctgcatgtgtttgtctttgtgagagtatcagatctcctggactagagttacagacagtcgtgagctgccatgtggccgctgagaattgaacccaggtcctctggaagagcagccagtgctcttaacagaagagccatttcccccagcacctgtctttttcaagaaagagtttcactttacaggcctggctgtcatgtttaaggtcgggctgtagacctgtctgcattctgtatgtcttagcttgttcgaatgtcctgtcactctgcaggttaagacctggtttcaaaaccaaaggatgaagtgcaagcggtggcagaaaaaccagtggttgaagactagcaatggtctgattcaggtaacaagatgttttctctgctttcctttttccccctccatcttaccatcttattttatgtgtctgtgccgtgtgtgtgtgtgtgtgtgtgtgtgtggctgacctatggctgttgggtatggatcccagatttcctgtaagagcagtcagtggctctgcctttgcttcccagtgtcatcctgatccatctatgtccattagtcctgtccctttcccatccctcttcctccacgcactctttcttgtgatctttggttctttgaggcaggctctctctatgtagccctggcagtcagagatctgcctgcctagtctcaggagtgctggggttaacggcctgtgcggccatgctaatcttttcagtatttctgcagtttacatctttagagtccccttttcactcattgcattaatcacctctttcagaagggctcagcaccagtggagtatcccagcatccattgcagctatccccagggctatctggtgaacgcatctggaagcctttccatgtggggcagccagacttggaccaacccaacttggagcagccagacctggaccaacccaacttggaacaaccagacctggaccaacccaacttggagcagccaggcctggaccgctcagtcctggaacggccagccttggaatgctgctccgctccataacttcggggaggactttctgcagccttacgtacagttgcagcaaaacttctctgccagtgatttggaggtgaatttggaagccactagggaaagccatgcgcattttagcaccccacaagccttggaattattcctgaactactctgtgactccaccaggtgaaatatgagacttacgcaacatctgggcttaaagtcagggcaaagccaggttccttccttcttccaaatattttcatattttttttaaagatttatttattcattatatgtaagtacactgtagctgtcttcagacactccagaagagggcgtcagatcttgttacgtatggttgtgagccaccatgtggttgctgggatttgaactcctgaccttcggaagagcagtcgggtgctcttatccactgagccatctcaccagcccctggtttatttttttaattattatttgctttttgtttatcaagacagggtttctctgcatagctctaattgtctttgaactagctctgcagaccagcctggccttgaactcagagatctgcccacttatctttgcctcctgaatgctgggaccaaaggtggcataccaccacacctggcatatatattgtttatttctatttctatttttattggtgccagagcaaacctaggacttagaacatgctgggcaccaactcaacttctgagctctatttacaacttggtgtgttagtgtatttgtcttagttctgaatttgtcctttttttagtgttaactctaggctttggagacagtgaggtgcatatactctctccttcccaagaataagtgcttgaacacccttacccacgcccacccacccatgctagtcttttttcttagaagcgtgggtcttggtatacactgtgtcattttgaggggtgaggtttaaaagtatatacaaagtataacgatatggtggctactctcgaggatgagacagaaggaccaggagtttgagggtagctcagatatgcaataagttcaaggccaacctgtactatgtttaaatagtaagacagcatctcgataaaataataaaactaaagtctcaacaaaataaaagctttcacctattaaggtgcttgcttgtccttggagtcccccaagagtaactgctatgttaatatctgtagaaagatgtttatatttgactgtaccatgatgaaccgatgccagctggactagtttaaacaaaataaaacactaattttaccttta

SEQ ID NO: 62 - protein, 305 aa, Mus musculus
MSVGLPGPHSLPSSEEASNSGNASSMPAVFHPENYSCLQGSATEMLCTEAASPRPSSEDLPLQGSPDSSTSPKQKLSSPEADKGPEEEENKVLARKQKMRTVFSQAQLCALKDRFQKQKYLSLQQMQELSSILNLSYKQVKTWFQNQRMKCKRWQKNQWLKTSNGLIQKGSAPVEYPSIHCSYPQGYLVNASGSLSMWGSQTWTNPTWSSQTWTNPTWNNQTWTNPTWSSQAWTAQSWNGQPWNAAPLHNFGEDFLQPYVQLQQNFSASDLEVNLEATRESHAHFSTPQALELFLNYSVTPPGEI

SEQ ID NO: 63 - DNA, 7445 bp, Sus scrofa
tggctgagccgagctgttatccagtactgtgtgtacaaaagcgacttaaaaatcctccagagtaataatggtttatatgtaatgactaaccggacacctagggtcctatgtctgcaagtcctttcctctggcttttgtcctgctgaaaagacttgcgtgtctttctgaaagctaaaaacacgagaaagaagtaaagtgggagttaaaaacaagtattatttttaccatcacctgatgcaccaacattcaacatgtgttttattgttaccttagggtgaatcaaagagaaaaatggagctaacatgtttctgcagaataagcctgaactggagacccaaaggagtctcaggtcaagaaattcattgtcccagcgggagtttcagtcaccggaaatagcctcaggaactggaggtgcatcttccatttgatctgatttttttttttttttaattttaaaaaaaattttttgcatctttgattttaaaaagtggaaacacggtggacctgcaagtagttcactgcggggtttattttgtttccaggttccatggtcccagttccccacccagtctgggttactcagcagccctctctttgcattacaatggccttggtgaggctggcagacgggattaactgggaattcgcaagggtgtgtgtgggcgtggggctgccaggaggggcgggcttaagtatggtcgatccttccttataaatctagagcctccaaaatttttctcattttgctagattggggtggttagctcctgttctcgtaagggtgactcacttcatcccattttttgatacttttaacacctggaggagatcttcatgattctaagctcttctatctagacacttaagcctggacttttcctacaatccagctctttggtggtttttttttttttcccccttcttcaactcaacatgagtgtggatccagcttgtccccaaagcctgctttgccccgaagcatccatttccagcgaatcttcaccaatgcctgaggtttatgggcctgaagaaaattatgcctccttgcagatgtcatctgctgagaccctcgacaccgagactggtaagaaaatcttgaatcttgacgatcttgaaaaattgaaaagctaagctgcttcagggaaatagaaagaaggaaaggggccgagggtcgcctgtttcaccttgagcccatcagtataggcaggtgtccttatctattaatcctctcgtcacctctttttcaactgtaacttgataaggtcatgccctttcccctgtgtcccaggcatcgggaactgtggacagagagacgagggattctgcaggccacctgaatttttttttttttccttcccttttagggccgcacccacggcatatagatgttcccaggctaggggtcaaattggagttcagctgccggcctacaccacagccacagcaatgcgggatccaagccgcatcttggacctacaccaccgctcacagcaacactggatccttgaccgactgagtgaggccagggatctaacccgcatcctcacggatgctagtcagattcgtttccttggcaccacaatgagaactcctgtatggagtatttgaaggctgactgcacaggcactgaggaaaggaaatgtgttgtgatcgactgacgtgtaaatcttacatggtatcactaagtccaagtcctgacatcacgcttgaggcggtgagggtcaccttttgggtttgtctatttcaggcatgccggaaatggcttcgctaatttaatcgtgtgaagcgcaccttgtagaaatggtttgtctttctattacagtggcaactggcactcccaacctatgagggtattaactgggcagcttgcgtttgtgagcacctgttatggtcaagtcgcctaaaccccaaggaagtgttcaccctgttgcatggtagatgattccagaagatggaatatgctgacagccaaagtggctcttcagaagagctcagatttgaaattaagtttggcttcaggagttcccgtcgtggcgcagtggttaacgaatccgactaggaaccatgaggttgcgggttcggtccctgcccttgctcagtgggttaacgatctggcgttgccgtgagctgtggtgtaggttgcagacgcggctcggatcccgcgttgctgtggctctggcgtaggccagtggctacagctctgattggacccctagcctgggaacctccatatgccgcaggagcggcccaagaaatagcaaaaagacaaaaagaaaaaaaaaaagtttggcttcaaaaatttatactcaagtgctcaggcttctaactggtaactgcgggtgtgcagggtgctcggcatactataaaggcaggactacctcttatttttttcttttacatttttggtcaccctgtgacctatggagtttctagccaggggtcaggctggagctgcagctgcagcaacgccggatcctttaacccactgttctggcctgggaacaaacctgtgccctgaccctgcagagacaccaccagttccgtgtgccatagtgggaactccactatcccagcaccacctcttttggaaatcaatttggcagaagttgttagaaataaaaaggtaggcgttctctagtggctcagtgggttaaggatgcatcgttgtcactgctgcggctcgggtttgaaccctggtccaggcacttcatatgctgtaggcttagcccccccaaaaaggtagtaattacaaataaaaaacatatgggagttccctcacgtagctcagcggttaacgaacctgactaggatccatgagggaggggggtttcgatccctggcctcgctcagtgggttaagggatccggcattgccttaagctgtggggtaggtcacagatgctgtttggatcctctgttgctgtggctgtggcgtaggctggcagccataaaaggcaaaaataaacaaaccaaggtatggagttcccgttgttctggctcagaaggctgagaatctgatatagtgtccctttggcctcactcagtgtggcttgagggtctagcattgtcgcaagctgtggctgcggtgtaggccagcggctacagctcccattaaaccgctagcctgggaacctccgtatgccatgggtgtggccccaaaaagacaaaaaataaataaaaataagacgtgagtcactatattgtacacctgtaatttatagagtattatacaattatacttcaatagaaaacagagtaacttccttggtggtctagtgtttgggattcgattctttgacgaggttatggcccaggttccataccttgtctgggaactgggatcccacatcaggccgaggtgtgctgcgggcaaaaaataaatagtaaggacttcccgtcgtggctcagtggttaacgaatccggctaggaaccaccaggtttcgggttcgatccctggccttgctcagtgggttaaggatccggcattgccgtgaactgtggtgtaggttgcagacgaggctcagatcccgtgttgctgtggctctggtgtaggccagtggctatagctccgattggacccctagcctgggaacctccatatgctgcgggagcagcccaagaaatggcaaaaagacaaaaaaaaagtaaaagattatgattggcttgtcccaaatgccaaagtaaaacgaacccaaaaactccatgaaggaggaatgactttggaaatgaggtcacaaagttaatgaaggtaaagtctggatggaaacagggctggtcagaattcatattaccctaccaggcctggtatcagaactgggcagtatgctcttgattttatagggtccctggaatcgggatcatgttttaaaattcagcgggtgaagactgatggaaaaagttatggggggaacacaggaggtgggagtcaagtgatcattgtgacctttgagaacagccccgggtgtgggctcctgagcttagatgggcaggaggaagtggttttgagcccctctctgctttccagcgatgcataatatcagccatgtccatggtttgtcaaacagcactgcacaaaggcgagcaaggtgttcagggtcacttttaagattaaaatcagtacttaactacctagctctgaggttgtgagaactctaatattagtgctttgaacacaagacatttttaatattggaagttttagagaaaagtgtcattttattcccaacagtctctcctcttccttcctccatggatctgcttattcaggacagccctgattcttccacaagccccagagtaaaaccactgcccacatctgcagagaagagcacagagaaggaggaaaaggtcccagtcaagaagcagaagatcagaactgtgttctcgcagacccagctctgtgtcctcaacgacagatttcagaggcagaagtacctcagcctccagcagatgcaagaactttccaacatcctgaaccttagctacaaacaggttagggttgttttgttgttgatgtaataggaaataaaaataaggccgatttctatgttctatgtgtgtgtgcaccccgacaaataacttcatgtttcatgtgaaaatggaaacttttttttttttttgctttttagggctgcaactctggcatatgcaggtttccaggctaggggtttaactgacgctacagctgccggcctacaccacagccacaagcaacatcagatcggagttgtgtctgcaacctacaccacagctcacagcaatgccagatccttaacccactgagcgaggccagggattgaacccgcagcctcgtggttccttgtcgggttcatttccactgctccatgatgggaactcctgaaaatggaatctttttttttttttttttttttttgtctttgttgttgttgttgttgttgctatttcttgggccgatccctcggcatatggaggttcccaggctaggggttgaatcggagctgtagccactggcctatgccagagccacagcaatgcgggatccgagccgcgtctgcaacctacaccacagctcatggcaacgccggatcgttaacccactgagcaagggcagggaccgaacccgcaacctcatggttcctagtcggattcgttaaccactgcgccacgacgggaactcctgaaaatggaatctttaatgtgaaaatggaatcaaatattgtgtgaatgtgttatagtttacttaaccacttttccttgttgcacaaaccaaagttgtggaaacatctttataatctttcttaatcaaaggactatcttctgaatgaggagagtccctaaccaacacgggttctcattaaaattgcccgttttgtttttctctgtgcatttggttacttagtgaggttaatcatttttcatattattagacctttttttttttttctttttttttgtctttttgttatttcttgggccactcctgtggcatatggaggctcccaggttaggggtcgaatcggagctctagccaccggcctatgccagagccacagcaacgcgggatccgagccgcgtctgcaacctacaccacagctcacggcaacgccggatcgttaacccactgagtaagggctgggaccgaacccgcaacctcatggttcctagtcggattcgttaaccactgcgccacgacgggatctcctagccattttattcaatcacatggttttcttttctttttttttttttggccttttctagggctgcgatcccgaggcatatggaggttcccaggctaggggtcgaatcggagctgtagataccagcctacgtcagagccacagcaacatgggatctgagctgcatctgcgacctacaccacagctcacagcaatgccggatccttaacccgctgagcaaggccagggatcaaaccctcaacctcatggttcctagtcggattcgtgacccactgcgccacgacaggaactcccagatggttttcttactggtgccatacttagaaagtccttccctattccatgacctttctttttttcccccggctgcactcaagtcacgtgcaagttcccaggccagggagcaaacctgtgctgctgcagtgacaacgctgattccttatcccactgccccacaagagaactcccatgatcttattttacacatacatattcttctacttctgtgatcctgttttctgactcatagtttataaatcatctaaaaattttagtgcattctgtgttgtaatataatttaatattttctaaatagttgtccctgtggtatgtttcataattcccgaattaaagtaacatttttatattcaatgtaaatgtgcttacttggagtggggtttcttactgcaaacaaataacgtgttttgttgggtttttttggctttttagggctgcacctgcagcatatgggctaggggtcgaattggacctgcagctgctggcctatgccacagccacagcaacatgggttccgagcctcgtctgcgacctacatcacagctcatggcaacgccagatccttaacccactgagtaaggccagggatcgaacccgcatcctcatggatactagtctcgttccttaaccactgagccacaaagggaactcctaactggttatttctgagtctgagatagttgtagctgccaggggggaaaaaaaagcctaatatctttgatttttagtacccctgtattagtattttatgtttttctgttaccttttccttacaggttaaaacctggttccagaaccagcgaatgaaatgtaagaggtggcagaaaaaccactggccaaggaatagcaacagtgtgattcaggtaacaggaaacttatttttctgctctttcctagcaaggactttgtagttttgtccattgctgaagcatgtaatcccaacaaaagacagttctgagtttccttgtgctttttcagttaatccatccttctctttcaaagggctcagccagtacagaatacccgggcttctattcctatcaccaaggatgcctggtgaacgcttctggaaacctgcccgtgtggggtaatcagagctggaataacccatcatggagcaaccagacctggaacagccagtcttggagcaaccaaacctggaacagccagacctggtgcccccaagcctggaataaccagacttggaatagccagctcaacaactatgttgaggaattcctgcagccccagctccagtttcagcaaaattctatcagtgatttggaggccgtcttggaaactgctggggaaaatcataatgtaatacagcagacttcaaagtactgcggtacccagcagcaaatcatggatttattcccaaattactccatgaacatacagcctgaagatatgtgacgatcattttatttttttaaaaaattttattggaatatagttgatttacaa

SEQ ID NO: 64 - protein, 304 aa, Sus scrofa
MSVDPACPQSLLCPEASISSESSPMPEVYGPEENYASLQMSSAETLDTETVSPLPSSMDLLIQDSPDSSTSPRVKPLPTSAEKSTEKEEKVPVKKQKIRTVFSQTQLCVLNDRFQRQKYLSLQQMQELSNILNLSYKQVKTWFQNQRMKCKRWQKNHWPRNSNSVIQGSASTEYPGFYSYHQGCLVNASGNLPVWGNQSWNNPSWSNQTWNSQSWSNQTWNSQTWCPQAWNNQTWNSQLNNYVEEFLQPQLQFQQNSISDLEAVLETAGENHNVIQQTSKYCGTQQQIMDLFPNYSMNIQPEDM

SEQ ID NO: 65 - DNA, 5154 bp, Bos taurus
acattggactggatggctcttatcttacaggtgactcctttcattccgtcttttttaaataaatactttcacacccggagatcttcacctttctctaagtttcttctacctagattcttcagcctggacttttcctagcatctacctcttaggttttttccttctccttcaactcagcaacatgagtgtgggcccagcttgtccccaaagcctgcttggccccgaagcatccaactctagggaatcttcacccatgcctgaagaaagttacgtgtccttgcaaacgtcatctgctgacaccctcgacacggacactggtaagaaaataccgaacccttgaggggctaagttccttcagggaaagagaaagaagggactgaaggtcatttgtctccctcttgagcccatcaatataagcaggtgtcatctgttaatcctctcgacacctctttcccaactataatctgatggggtcgtgcgctttccccggtgtctcaggcgtcaggatctgtggaccgagagacgggggacccgggaggagcagttcaaatgtatatggtgcatttgagagtttaggtgcgtaggcaaatgcaatgtgatacactgatgtgtaaaatcttagcatcgtgcggagcacccagtaacagtaaatgttactgctaagccagaagtaggaacatcaccgcttggtacgggtgagcatcaccttttcggtctgtctattcaaggtgtgctagagatggcatcgttaatgatccgaaacgcaccttttggaaatatttcacctttctactatacaagtagccgttgtgtcttctcctaacctctggatgtctggatattactgggtagtttgtaagcacctggtatgctcaggtctcctaaatccaggggaagtaagtgttcacctgcctttatggtgaatgattccagaaggtttaatagactgcctaagtggttaagagttcagatctgaaatccagtttggcttcaaaatctatgctctagtacttaagcttctaactggtgactgtgaatgtaagagatgctcaggatactgtaaagacagcaccacctttttgggaaatcaatttggcagtcattattaaaaataaaaagttaacactagccatttacccaggaatgcgatttttaacatttatggtgtaagacagccaaagaactatttgactacaactgtagaactcggttgtggagaagggaataattaaaataattgctgtatttgaggcaagatgtcccaactgcgatatttgagtgttggattttaatgttaaccccattttcctaaattttgtgttagtatccttttataatttcacagattgaaaatacagcacttaatacaagcaagtgggcatatcctcctagcaagctaactgtacgtttgtaaaaatgattaaaaaaaaattttgttaggccaagcccctcactgtgtgggatctttgtttaaccagggatcgaagcgtgcaccctgcattggaagtgcagagagtcttaaccactggaccaccagggaaatcctagatgattttttttttttcccctagatgatttttaagacactcctcacctctagtcatgagttgaagaccttcctacttgtgaaattgtgatcttttttttttttggtagttgttgctgtttaaggcctgtccatttattccatgacaagggtagaatttgagttgagcactgggaatacctctgtacaattaaatctgatacaggaaataaattctcagttacaaagtcgataatatatgtcaagccctgtgctagacaattgttgtctgttaccttgttttgttatttctaaattttttgtctgttgcatcatattaatcaatggaaaaactccatgaaatatacaacatgggaaagatagcaaatattttataattgtacatggagtataacctttaaaaattgtaaataactatattgtacacctgcgatttacatattacacagtaagcatatttcattgaaaaaaaaaaaaaaactatgataagcttggcccaattgccaaaccaaactgaaaaaaaaaccaaactctatgaggaagggattcctggaaatgagaccacagagctaaccaaggtctgggttgcaataggagtttattggaattcacattttctgacagtcctggtattaagactgggtagtaaactgttaattctatagggtccccaagaatctgggtcatctgttttatcaaagaggtttgagtcccccattgcttcccacccaggacaggggaaactggtgagctgcagtccacagggtcgcagagtctggacaggacttagctactgaacaaaaccgcttcccagcaacacatgatattaaccatgtctattacatgtaaaatgttttttgtgcaaaacttggtagagtgttcagaatcgcttaagaataaagttattacctaccatctcgctctgaggacttataatagtgctttgaaaacaatgcatttttaatatttgaagttttagagaaaagtgttgttttattcccaacagtctctcctcttccctcctccatggatctgcttattcaggacagtcctgattcttccacaagccccagagtgaaaccactgtccccgtctgtggaggagagcacagagaaggaagagacggtcccggtcaagaaacaaaagattagaactgtgttctcgcagacccagctgtgtgtgctcaatgacagatttcagaggcagaaatacctcagtctccagcaaatgcaagaactttccaacatcttgaacctcagctacaagcaggtacagttgttttgttgtctgtgcaataagaaataaaaaataagggatttccctggtggtccagtggctcagacgcagcactgccagtgaagggggcctgggttcgattcttggtcagggaactagatcctcccacatgtcgcaactaagatcccacacaactaagataaattttttgggaaaaaaaaaaagaatatttatgcacctctacaaataagttagtttaatgaaaatggaatctttttgtaatgtgttttgtgaccctctttctttcactaaatatctattgcaaatgtgtcataatttattaaaccatttcccatgttaagctaaaattgtgaaaaagtttccaattttcccttaaacaaaggaaaaacacacttctatcatcttgagttagaagagtcctaggcaaccactggttctcattaaaattaaagttgcacgttttatctatacatctgattactgatgaagttaatcatttttcatatatttattagctagtttattcaggcaaatggttttctatctctggtaccatacttggaaaagtcctctatcaaatgatcttaactttttgtatagttgtccttgtgaagtatgtttcatcattcttgaattaacataccattatcatattaaatgtaaatgtgctaatatggaaggggggcttattattgcaaacaagttacttttaactgtgactaatgaacagtatgggtagacatttaaatgtgaacctcctagttcatagccatagcctcctagccatactctcagtgtatccaactggttaagtttattaatcataagtttattaaaaaagccaactgacttgaaaggcttgaaattcacccagattcaggatttaagagtctggtaattagaatttttgtttcaagtttgagatagttctagctatcagaaaaaaaaccaaaccttaatattctttggttcttactatcaatacatcctgcattactaatattttatttttaaatttatttgtgggttttggagggggagcggtttggccatgcagcacacgggatcttagctccctgaccagggactgaacgcatgccccctgcattggaagatcggaggtccctactaatatcttaaactttttccggttatcttttccttgtcaggtgaagacctggttccagaaccagagaatgaaatgtaagaaatggcagaaaaacaactggccgaggaatagcaatggcatgcctcaggtaataacagaaaacttaaatttttctgctttttcctaacaaagagtttttagttctgtctattgctgtagcatgcaatcccaaccatggacaattctgaacttactttttcagttaatccattcttcttttttcaaaaggggccagcaatggcagaatacccaggcttctattcctaccaccaggggtgtttggtgaactctcctggaaacctgcccatgtggggtaaccagacctggaataaccccacgtggagcaaccagagctggaacagtcagtcttggagcaaccactcctggaacagtcaggcctggtgcccccaagcctggaataaccagccttggaacaatcagttcaacaactacatggaggaattcctgcagcccgggatccagctccagcagaattctcccgtctgtgatctggaggccaccctgggaactgctggggaaaattataacgttatacagcaaactgtcaagtatttcaattcccagcagcaaatcactgatttattcccaaactaccctctcaacatacagcctgaagatttgtaacgtctatttgtgacggctattgtatgggatcttaatgtgagcagagactgtattctctagatttttttctcattctagaattctgtaccacttccccttagtaagctgcttttcactataccttctgtgtcaatttgagggaagggtaatgagtccagtaagaggtttcagaagcattgtataacatgacaaaaggtgtctggctatcgataactcgattataatactttggatataatatataatattttggatacttttaggatctagaatctaactttaagcacagggggcaaaagtacaaagacgtatgatgaggatttttcatattttctggcatagggaggctttacttgctaagagtcccagtccttaagatgaagagtgctttactgatttcctccaccccttttagccattttactacaacgcctaatttgttcatcactttttggagaacgatattttgtattttgccacatcataagtagtaccagtttggctggtttgttgaagtacaaataaaaaatagccattt

SEQ ID NO: 66 - protein, 300 aa, Bos taurus
MSVGPACPQSLLGPEASNSRESSPMPEESYVSLQTSSADTLDTDTVSPLPSSMDLLIQDSPDSSTSPRVKPLSPSVEESTEKEETVPVKKQKIRTVFSQTQLCVLNDRFQRQKYLSLQQMQELSNILNLSYKQVKTWFQNQRMKCKKWQKNNWPRNSNGMPQGPAMAEYPGFYSYHQGCLVNSPGNLPMWGNQTWNNPTWSNQSWNSQSWSNHSWNSQAWCPQAWNNQPWNNQFNNYMEEFLQPGIQLQQNSPVCDLEATLGTAGENYNVIQQTVKYFNSQQQITDLFPNYPLNIQPEDL

SEQ ID NO: 67 - DNA, 10372 bp, Mus musculus
gtcacacaacagcactgaagcagccttgcttgaagcaagcttcctttggcctaagactttgagggagtcaagaaagtcacgctggagaccgatatggacaggtaacaagacagtctcatctgcttgtgcatgtgctccagtagtgctggctgcctgtctggatggaggctttgcctgtcagtgcgcgaatttcctcgtctgcttgccaccctctgctcaggtcttttgggttttggacctaactctgaccacgaagttcttcccttcccccggtttctctcttctctgtgttgctagagataggaagccttgacttgtcctgagatttgggcagagctagagccggcttgtggtaataacagcgaagccttagaggcccgcgccacaaagaggtcgtagcaactccttactaaaaacagtagtggttattttcacaattatttggcaaatatccaacatcttaagactcgcatggggagtctttacaggaattatttagttatagcaagaagatttgtacttctcaaaaaaaaaaaaaaaaaaaaaaaaactaaacatttgagatgaattgcttgcaactcattacaatggtgtctattgaaggagagaatttcattaagacaggcaatttagtgttatagactcaactgttagacacttggtgacatttttactgtttaattcatctatgcagagatttcttagcttcttgaaagcttttatatgcagctcatgatgagccattatcagaaatttctctcttgatttttacatttattgccagtgtgtgagtcactatgcctaaagcccatacacttgagctcacttccgtttggctatgaggtttagaatatggagttaatatagctaatggtagcagggtgttcttcagattccagatttttcctttcttgtcttccttctttctttttgttacccttctcctaccccctcttcttctccccctcctcctcttcctccctcctccccatctcttcccctcctcttctccctcctccccctcctcttccccttcccctcttccccctcttcctcctcttcctcctccttctcctgctccccatctctttccctcctcttctccctcctcctcctccttttgccccttctcctcttccccctcctcctcttccttttccttctcctccttctcctcctccctctcctccccctttcctcctcccactctccctcacccctatcagggaccacattgaagacctcacacatgctagacaagtaatctgccacttaattacatcctgagccctcaaaaagcaaacagacagacagacagacagacaaacaaacaaacaaacaaacaaatgttcacaggaggcaggcagacagcatgagctgcttctgggtttatagtgaattttgaaaccaaatctgagatctatgtcctgatggagaagggtccgagagaaatgcatgagcatggcaaaatgcaaagcaaagacgaggctgagattcagggagaagcaaacaagacagtggagagacacaggatggcacggcatggactggagcaagggcagcgggtaactcaaggcagccctgctactaggctgggattatttttaaccccttgagtctggtttgcattgctggggaagcagctaaggttctgcctcaaggagcacagctgtctcagcagctggcgatctacaggtttgggacaccacctagcaaagtcctccttaccgggagggacatcccgaggagagggagctggaaataggctcctagctagagttgaggggagtgctggatggaggtgcccagtccacaggtcaggactgtgcagctcctcccaccgtggctggaatcttaaaatagaaacagtctattacatcttcctgtggttcagacacaactcttctatttgagacacatcctttctaaactccaaggatacctttccttcataatttcagcatccacccccaatacacactcataaatacacaaacacacacacagagtaagagagagagaaagagagagataagcacgtatgtacacttgctacccacagtatgtaggaaaagttctctagggctgtgtgtacggctctgtggcacagcactcactagcaggtacaagactccatgttcaacccactgaaaaagattctctacttttcccatctaggtaacacaggaagtttagttaaatagaaagggaatttattgctaagagatgaagtttaagctgtttaaaactggctggattagagagatacctgtgcttattattataacatgctgagtttacctgtactgtggtggtgatgatgataatgatgctgtgtcatcacatagcccccgtggcttagaattctccatgaaagtcaggctggcttccattacagaaagatccacctgcctctgccccccttcgcccccaagttctggatttaaaggtgtgcacaccatgcccagcttctaaagggtttttataatttagtgatgaatgtagacatggaggtactatgatcgttatcatggtaaattactatttcaaaataaagctatgatcattagaggccaagacaggaggaccatgagttcgaggccagctgcagcaacatagagatttccagactagcatggatcccgcagcatgagcatgtccccaaaacaattttgtttttccaaaagtcagggactgtcacgtgtgttgaactatcattaaagcatgagctgtgaacgtgtgaacatgcattcaatgatagtatatggttatttatagtggctctaaccactgcagcaccaaagcggaacatatccaaatttcaatcagcacataaatgaataaacaaaacatgttctacccatacaatagaatattgctcggcaggaataaggagccaacttctgatatttgggtgaatataaaatttactatgttccgtgagagcagttacacaggaaggaggaaacgtgatttatatgaaattatagaaagttagaaataatttacatttacagagagcaggtcggcggttgcctgggtaagaggagaaagaacagccaatagcgacatagaagctttaagaagcctagaaatgtctcctctgatggccctggcagtctgggctgcggacctgccggcattcacggagctgtagattttaagcgagtggagctcactatgtaaattgtatctcaacaacaacaaaagtgaaaaacggtttcaattctcttgcatcaaaaccgtattcaaattcctaactagctcttaaaaaaaaaatcattgcacttccatccatcaccactgtgtggcggtgctgtgtcgacaagtgagcgacacagttgtttatcatccgttttatctcctggctcatgtccaccgctttaacaggaactgtaatttttttttttttttaagaaacgtgagggctgggaatatggttctgtgggaacagcgcttgccatgaaagcaaaaggacctgagttgaggggtccaaaagcagacacctgtaattcccgtgcttctaaggcaacataagaggtggagaaaggagaaccccaggaagcttatgagccagttagcccagggcgcacagcagagagcaagagattctatctcaaacaagacagaagtcaaggaccaacacccaaggttgtactctgctcgccacacgtatcctgtagtatgtgttgcctctacccccaccacatacacacacacgcacacactccacaaagattttaaaaattatttttaagtgtgtgtgtgtgtgtgtgtgtgtgtgtgtgtgtgtgtgtgtgtcaatgcatgtgccctcaaaagtcagaggtgtcggatcctggtggaactggagtgacaggtggttgtgagctgcctgatggaagagcagttcgtgctcataactgctgagccatctctctagtccccagaaaacctgtatttttaaagaaagaaagaacgaacgagaaaaaaaaaacctcgggggctggagatgtagctctactagagaacttgccagcatgcacaaagccctgggttaagtccccaacaagtaggtgggacaagcctgttgtcccaagaccaggggagtagaggaggcaggagagttctccttgtcaaattccccaccagcctgagctaaatgagttctcatctcaaaacaaacaataaaaataaataaataaaataaaatcaacaaaactgacccagcaaaatccaaaaatgaaaacccaaagacctaagcaggggtgggggttaggggggcgtggtttgtcagacggctcagcaggtaaaggcataaactgccaaacctgatgtcttgagtttgatccctcgagctcacatgatggaagcagagagccaacttccacaagttgccctttgacctccacaggtatgtgtatgtccctacacacatatcattcatacaacgatagtaaacaaatgtgattttttttaaagacacagaggcaactatttcttatacttctgtttaatgaagaatggatagatactatgtagcaacgtgatcgcaagtcgacatgacctcatatgaccctgtgcttagagagggaggaaggacgcccccagcaaggcccatctgcaacattccttttcctggatagagacaggacacccacagaatatggctcttcaaggaagagagtgacctttcttttcgcaggagctcagtggctttgataccctgttgtcttccttcctcgctgtggctcaagtgctggaagtagagagtgactttctatgttttcctttgctttgtcttgtactgagtcagacctagagcctcatacatgataggcaactgctgagctactgagctacgttcttgtggtggagctcaggctgggctcaaacttacagcaacctccctcccccagccttccccccactcccccccgccacccccccaccccccacccccgcactcccaagtgctgaggttacaggcacaagcaacctaacctggcccttgccatgttttataacttgcttttggaagacttctggttctgtgatgctactgggttagcggggagacaggagggcagaaggttaaaggtgtctaagaccatgtccaaagcccagtaggaggattagggagatggctgggctggagagatggctcagtggttaagagcactggctgtgtttgcaggggaccagagttcaattcccagcaaccacataatggctcacaatcatctacaatgggatctgacaccctcctttgacatgcaggcatgcatgtacacagagcagtcatacataaattatataaataaatacattaaaaaataaaaagtaataaagggtaattacctagtttgactgttgcagcgaggggggaggggaagaggaaagggaagagggtgggcagggaaggattttaaagtgagcatgtctcaggtatccagaaaaggaagcacgactatgctttctggtttaacctatataatgataagatttaaaacatcatgatgatcaaagtaggcctggggatgcagctcggtgctgaagcgctcagctaccttgcctatggctgtaggtccagccatcagcagctgcaacaataataatcagagctgaaggaagactatggtgacagagaagccttgccctgactttcttctccaactcacagccttctgatgaagcaaaagaagtttctttaccatttcaaaaatgtccgctgggccaagggacggcatgagacctacctctgctacgtggtgaagaggagagatagtgccacctcctgctcactggacttcggccaccttcgcaacaaggtggggggggggttgcggggttggggagggggtgggtggcagctgttgacactaaagctatggctgcccctggtgccaaatgttgaggggaccaaggcaggccgattgctgagtttgagacagcctggtctacagagagagttttaggactacacagagaaaccctgtctggaaaaacaaacaaacaagcaaacaaagagtgaaataatggtgcatgcctgtatttccacagtgctagggctgaaatgaaggatctgccttgccagacaagccccgcccctgagccctcccctaaccgcctctggcccctcagcccctcagccctttaatccctcagctctgggttctttctcaagcactttcttgagtgagaaaaacaaattatatcttcagaatttttgaaaatcaatgaggaaaaaaataggtaaaatgacatcaactcaactttatttcccaaacaattttgttcccaaaagaccagagaggccaatgaccgaccacctttaacccaatgagtttccttcagggaccagagagaagtctctgttgtttgggtaattagataatccttcggctgcctgaaagaactgcgtttctaagagagttcaccaaattgcagattggcttccatgggcttctccttctctacttggagtcatgacacactgtatttatagacagcttgatcaagtggtactttctcttcgcacacaacaccagcttgatttactgctaaggaaatagtgcaaaaaaagatgagtaaaagaaaaactatcttcagtcttcgacaaacgattttcgcaataggagatgggcctattacgattgcagttattacagtcactggcatcacatagcatgtacacacacgcgcgcgcgcgcgcgcacacacacacacacacacacacacacacacacacacacacacacaccccttaattgccttccacttaaaacgccagacgccaagtcagagacgaaatctcttcaataagctttttcctccctccttacaaattattctggcgccacctagtggccaaggtgcagtttgcagttttacaacgtggcgtccaaacaggcacttccgggacacgaaggtaatccctgcaaggtgtgtatcctttgtcccatagatgtgcagctttcctttacccaacaaagccagtgtaataaagccatttgactccaacaagtgctatcttaataagagaattatctttatgctgggagtgatggcacacacctttaatcccaaccctccagaggcagaggcagatggatctctgtgagtttgaggactgcctggtctacataatgagttccaggtcaagccagtgcgacatccccacaagcatcccaaatggcctgggtgggagagcatgcaggtcacgtcaccagtgctctctgctctttctccagtctggctgccacgtggaattgttgttcctacgctacatctcagactgggacctggacccgggccggtgttaccgcgtcacctggttcacctcctggagcccgtgctatgactgtgcccggcacgtggctgagtttctgagatggaaccctaacctcagcctgaggattttcaccgcgcgcctctacttctgtgaagaccgcaaggctgagcctgaggggctgcggagactgcaccgcgctggggtccagatcgggatcatgaccttcaaaggtgagacttgcacactggagagagcggtctgagttgccactcagagtgagtgtcagcggggaaactgggggtggggtgctacttaaagaccttcagttcgtcctggatatcaaaagtattactttattttttgaggtaggatctcgctatcccaggctgaccttcaacttgcaattctccgacctctgccttctgagtggcggaattacaagtatacatcaatctcagaattatcagaatttgagagatagaagttggcagggctacaggtgcgctcagtggcagaactctggtccagcatgtgcaaagccctgcattccacctttagcagtcaaataataaattgaggagggagaggaggaggatagtggtcagagagatggttccgtgggggcccttgcctttgtaccttaagtttaacccctaaaacactctgactttctgaccttcacctacacacacacacacacacacacacacacacacacacacacctccttcttatttatctatttatttttcttttaagactatttttactgctggaatacatttgtagaaaatcgtgaaagaactttcaaagcctgggaagggctacatgaaaattctgtccggctaaccagacaacttcggcgcatccttttggtaagtctgcctgtctgtctgcctgtctctctgtctgtctctgtctctctgtctgtctctgtctctctctctctctctcatacacacacacatacatacactcacacacacacacacacacctggagcctcttagttatttgtttgtattatgcattattttatacaatgattacttcaaggcacttacaacccagttttcttttctgctttacccaggacagagcttccacttagacgcttgcctcttgcctcctcttcgctcagtcttcataactctttccttttgctaacctcccctcaggtggggttccttccagggcagaattcgccccttctttttttcctggtcctcaagcaatttactttcctctggagccacccacttcgtttagacactttcctttccagagatcaaatttaaagcccttcactccgtttatatcatctctctttctccacagcccttgtacgaagtcgatgacttgcgagatgcatttcgtatgttgggattttgaaagcaacctcctggaatgtcacacgtgatgaaatttctctgaagagactggatagaaaaacaacccttcaactacatgtttttcttcttaagtactcacttttataagtgtagggggaaattatatgactttttaaaaaatacttgagctgcacaggaccgccagagcaatgatgtaactgagcttgctgtgcaacatcgccatctactggggaacagcagaacttccagactttgggtcgtgaatgatgctcttttttttcaacagcatggaaaagcatatggagacgaccacacagtttgttacacccaccctgtgttccttgattcatttgaattctcaggggtatcagtgacggattcttctattctttccctctaaggctcactttcaggggtccttttctgacaaggtcacggggctgtcctacagtctctgtctgagcaatcacaagccattctctcaaaagcattaatactcaggcacatgctgtatgttttcactgtccgtcgtgtttttcacatttgtatgtgaaagggcttggggtgggatttgaagaatgcacgatcgcctctgggtgatttcaataaaggatcttaaaatgcagatgaggactacgaagaaatcactctgaaaatgagttcacgcctcaagaagcaaatcccctggaaacacagactctttttcatttttaatgtcattagtttactcacagtcttatcaagaagaagagttcaagggttcaacccaattttcagatcgcgtcccttaaacatcagtaattctgttaaagggatcaaacatccttatttcttaactaactggtgccttgctgtagagaaaggagcaaagcgcccagatccaaagtatatagttatcatagccaggaaccgctactcgttttccattacaaatggcaaattcttccccgggctctcctcatagtgcctgagacggaccacggaggtgatgaacctccggattctctggcccaacacggtggaagctctgcaagggcgcagagacagaatgcggcagaaattgcccccgagtcccaactctcctttccttgcgaccttgggaacaagacttaaaggagcctgtgacttagaaacttctagtaatgggtacctgggagtcgtttgagtatggggcagtgatttattctctgtgatggatgccaacacggttaaacagaatttttagtttttatatgtgtgtgatgctgctcccccaaattgttaactgtgtaagagggtggcaaaatagggaaagtggcattcacctatagttccagcattcaggaagctgaggcaggaggattgtaaatttgaggccagtctgagctgtaaggtgagaccctatttcaaacaacacagccagaattgggttctggtaaatcatacttaacaagggaaaaatgcaagacgcaagaccgtggcaaggaaatgacgctttgcccaacgaaatgtaggaaaccaacatagactcccagtttgtccctctttatgtctggtctccctaacaacgatctttgctaatgagaaaaatattagaaaaaaatatccctgtgcaattatcacccagtcgccattataatgcaattaaaaggcccacaagaaatcctgtatacacgaccgttatttattgtatgtaagttgctgaggaagaggagaaaaaaataaagatcatccattccttcctgca

SEQ ID NO: 68 - protein, 198 aa, Mus musculus
MDSLLMKQKKFLYHFKNVRWAKGRHETYLCYVVKRRDSATSCSLDFGHLRNKSGCHVELLFLRYISDWDLDPGRCYRVTWFTSWSPCYDCARHVAEFLRWNPNLSLRIFTARLYFCEDRKAEPEGLRRLHRAGVQIGIMTFKDYFYCWNTFVENRERTFKAWEGLHENSVRLTRQLRRILLPLYEVDDLRDAFRMLGF

SEQ ID NO: 69 - DNA, 10107 bp, Sus scrofa
atcttcattggacccagacaggaggaggaaggctgctggggtccctggtggtggtgatgctattgggggaggagcccaagggggcaagttcaaatttgaatgtgtggagccaatgcactgtcagaagtcagtgcagcagcagtggtgctggaggcaagttttccttggcctaagagtctcagggagccactctggaatctaccatggacaggtaaagcagtctacttgtgggtgggtggcctttctctcagagcaaatctgagtaatgagacggctaaactctccctttcttccctatcactgtctgactcacaagattcgcttggtcaagatgcacatttatttctctggatctgtctcatcttctgttcagatcttacatgctttctgccaaattctctctttcttaacttttatgcaccatatatggacttgtcactcattgatggtagtaatattaagtaagtaaatggtaagagactcaaatcatgaaaaggtaagagcaatgctatactaaaagcagtagtggtaactaataattctgtaaacaggagtcccttggtggcttaggggtttacggatccgttgttgtcactgcagcggctcaggtcactgctgtggcataggttcaatccctggcttgggaacttccacaagctgcaggcatggccaaaataaattctgtaaacattcaacaataaaacccattgaagaatagctttccaagggagattttactgaataattacactcaggaaattatttttttaaatgcctatattcaaaattaattgcttgaaagtcactaggactgtgtctgttatgaggagattaattcactcaagcaacttatttaatattataggcccaattgttaggcagttaatggcatttttactatttccattgtctttcaattccttcagacataatgtcttcacatgaagtttatgacatgttatcatagaactttttttcatagagcttattcctgtttttatgattactgcgaatgcatgaaaatttatatctaatccaaatactttatctcaattttattcttttacaaaggatctaaaccacgtggccaagaatcttaatggtagactaaatgttctttgggaaaattttgagggcaaaaatgtcaaatgtcagctctgttcacagtgagattttgaaaacgaatctcaggtacaagagaggaacaggactcagtggagatacttgtaaatactgaaatgcaaagcaatggtaaaaagagtcaaaattcagagaaagtcagagaaggagaaaagatgaaattcaataggagagaattattttcattaaggaaaagcctctctgcagagcccagtagtgacggcacacggcaggagaggctgattatttttaaagcatctgtctctggtttgcattgctggggatgcagccagtgttctgcgtcagggaacacagctgtcctagcagctgtcaacctgcggacgtgaaagactctctctgctgagtccttcgtaccctgaagagaaaccacgaagaggacagggtgtagaaacatgttcctagcccgttaggggcaagtgatgaatcaggaaagtcatttaacagctctgccgccccaaccccgccaaacgttaattgacaggtgaccatgatgcaatgcactctgactggtagcttctgatggaaacagaactattgtattttcatgtgaggtaggaggtagaaggccatctgattccttaacctatgtcctgtcctttcctgtactcctggacgtttcctcctcctcaaggtaacaccccccccacctgcggtgcatgatctagtcccccctccccacacccacttcccatccacacagcccaggaagacaggttaaaagtagaaggaaatttttggcaagagattttgaacctatttaaaactgggccccaaagaggatgtttcttcttttctaagcatttattatgtatttggtttgtatgtaatatgctgagggtgattatatgttaattaataattaacaattgtaatagtaacagtggcagtgctatggtggttaccatagtaaattactatcactttaaaataaagtcaatttggagttcctgctgtggcacagtgggattgcttgcatctctgcagcaccaggacacaagttcaatccctggccccgtacggcgggttaaaggagccagcccaggttgcagctgcgtcttggatctgatcccttgcctgggaactccatatgccacagggcagccaaaaaaagtagtgtaaaaaataaagccccccctttttttcacagtttttaattttttttttttttttttttttttttttttggcatgtggaagttcccaggccaggccaggtatagaatcggtgccacagcagcggcccaagcgactacagtgacaatgtcagatcctttacccactgggccacaagagaactccaagccaatttttattagattcttgttagcatccaattcagattcttgccaaatatgcattttttattttaaaataatgattgactaattttttatagttttatatacataatggatatggggcaatatgtctaattctctgcctcaggatttaaaatggattccaataagcttcaaattgcattcaagatattcaaagtgcaataactttaaaaatgtctaaccctggagttcctgttgtggctcagtggttaacgaaaccaactaggaaccatgaggttgcgggttcgatccctggcctcactcagtgggttaaggatccagcattgccatgagctgtggtataggtcgcaagctgtggtgtaggttgcagatgcgggctcggatcccacgttgctgtggctgtggtataggctggcgattccagctctgattagacccctaggctggaaactccgtgtgccatgggagtggcccaaaaaagacaaaaaaaaaaaaaaaaaaaaaaaactctagcccttgcttatttaacaaaatattagagcacttgacttttaaattcagggttctatctcatgcactccattattaaaatatcaataatcagcatattgtccattatgtctttggactggtacatgaatgtagaagctttattcattcacaagagtcccaaagtggaaacaatccaactgtccatcaacagctgaatgaatgtgcagcacccagccaatggaatattgctttgcagttacaaaaaaaaaaaaaaaaactctcttgatacacataccaccatgagtgaatgtcaaagtcataacatgcttagtgaaagaagtcagacacacacaaaggaggtcataatgtctgctttatatgaaattctaggaaagaagcagtaattatagctacagaaagcagatcagcggtgggcctgagagggagggaaagaactgactgaagaggtgcatgaagaaactggtggggaggggtgcgctgaaaatgttctgtatcctgattggggttttggatgtttacatctgccaatattcatagaattgtacatttaagtgggtgaagtatgtaaattatacctcaatgtttaaaaaaaaatttttttttaaagtttcaattctcatgccagcaaaccgtattcaaattactaagtcattgctttacaagttctctgcacttctgctcattgccactagatggcagaattctctccaccagttagataagtgcacagcgggacaaaaaccagggacactaccgggctttgctattaaccacactatagcttgggttatgctcacaaccacagagaaacttgtgttagcagagagtatatccacaaattcatctcaaagaagctgctaggaaacagagcaatctgtccctgtgtgtgaacacagcaaaataattatgttagtttgcaaaactacacaagaaatcagcataatcaaatcctgtaaatttatacctattaaaagaccagaagggaaaacttaggcatgttaacagtagttatcactagatagtatgtctaattatcattagtattggtattctaagcttttaaattctttcatatttaaaaacttgtctacttttttggagtaattcaagttgacagccaagtattaattttgtactttttttaatttggccttgcccaaggcatgtggaagttcactggccagggatggaaactgcaccacagcagcaacctgagcccctgcagtgacaacgccagatccttaacctgaggccccacaggagaactcccatgactttacatttgactcaaaaaatgacacttcctgactcaaaataggaagtctaattgaggagacagatgtcagcaatcaattgattacaaaggctgactgctttgatggggtaagcagagaacaacaggaaatcactgaagggtttttggttgctgttaatattcgatttttgcctagaaattttggggtagtgactgtgagatacatcttactggaagagctgaaattgtggttaggctttgaaggatgtaaaggttttgcccagagggaaaaggcaggaagaattcggtcaggggacgtgcatcagcaaagtcactggaaagaaaaaaggagcgcagcaggggacagaggggggaggaggactgcagtggtggggaaaagaagagaaaaagtcctaggaaactagaaatgcagcttgatactgaaaaagctggcctaaataccacgttacagagtttggagtttattctgtgggcagaacctaggggctcttggggagttccctgatggtgcagtgggttaaggatctggggtcatcactgctgtagcatgggttccatccctgtctccaggggcaaaaaagaaaaaaagaaaaaaaaatctttatttaaaaataaaaatctaaaactgtaattgtaatgtatacatgtaaggataacctgacccccttgctgtacagtgggaaaataaaaaaaaaataaaaaattaaaaaaaataaaaatctaaaaaaaagttagaaaagaaattaaaaaaaaaaaagttgggggtttttggcatgggaatgatagtctagtctcacacctgggtttcttgtgcggtccctccggtacagcatggccaatgttattttgaagggactggagagataagaggttaggccagtggtaaagattagggcttggactgaaaccgaaaacagagggaatagaacagggaccaatcagtaaatgcagaggactaattgaatatgaggagtgaagaagaagcagatgattcccaagctttgaacctggttaccgagggtggaaagtcagtgagagaagagaggcaggtcaggatggagggcaatttggggataaatactgttatgagcatgtttgaggtacacattggacatttagctagagattggagggggaacccaagaagatcagtatgggacgagagaacatgtttgtaattccaagttatcagcatctagaaggcctatggctttgaagttcttgctgtctctcgactgttcttaaatataagcatgaaagggggtttatattggattcagtaagtctcaggcatcatccagcaaagaaggcaagagcatcttctctgatttggcccaagtatcagatttgttaaaaagctgaagaaagcctaaaaaattaattaattaattaatttaaaaaaagaaaagagttcccgtcatggcggtggttaacgaatccgactgggaaccacgaggttgcgggttcgatccctggcctcgctcagtgggttaaggatccagccttgccgtaagctgtggtgtgggccgcagatgtggctcggatcccacgttgctgtggctctggcgtaggccagtggctacggctccgattggacccctagcctgggaatctccatatgctgcggaagcagccctagaaaaggcaaaaagacaaaaaaaataaaataaaaagaaagcaagcctggtgtgatgggtggatcagctgagctcctgcacacacttcctccttcctctcacccacagcctcctgatgaagcagaggcagttcctctaccaattcaaaaacgtgcgctgggccaagggccgccacgagacctacttgtgctatgtggtgaagcggcgggatagtgccacctccttctcactggacttcgggcaccttcgaaacaaggtatcaattaaaatttccttcccaggccgttcaaagctaaactcagggcacttttagagcctcctgctgatggtcctacgttcagcctgttcattggtctccactagactcctgaaacctttttcacatgtccatgcaagcacaacagctttgcctcaaagggtgtcatcaatgccagatccttaatgcactggaccacagcaggaactcctcaggttgaattttaaatgtgaaaaacaaattgagtatttagcaattttacaaactggggaaaaggaggtctcttgtggcacaatgggttaaggagccggtgttgtcacggcagtggcttggtttcccaggggatacaagttgtgtttacaccatacggtagtccttgaagtgtacaagagcattatatctaaacccccccaaaagtacaaatcttaattttaaaagtttattgctcagaattgctatctgagccttcaggagtaacatcaaagatcactgaccacaaaaaaaaaaaaaaaaaaaaatcaccaaccacaaagatcaccctaaacaaatataaaagtttgaaatttgcaagagacacaatgtgagcaaacgctgttggaaaacatgacactgagagacttgctccaggcaggcttgccacacaccttcaaaacctgcaaaatccaatacagccaagcacagtaaaataagacctgcctgtatttcattgctcttagaccatagcagccagcgcctcttgtaggcctcatcgaaatctataccctaaccccaaatttcctgacctccagctagtgaggtcaacaggcacttccaatcaattttccttcccttccaaggaaggaaaagtaacttcacaaacgcaaatgaaagccctgtgatagcatgatgctgtttctttcatccactcaactcattccatcctccccattccacagcaaatccataggctttccccttcctaaggcaaagagtttgaggtcaccacttagcattgtaccctttccagcagatgcttaacctttctgacacctgcaggacaaaaccgcagacactccaaaataaaatgttgcagagggagggtcccacattaatgatcgtaaaagcaaccagcacgccagtcaacatgaaggctctgagccttccactctctgagccttccactctgtttgcagtccgggtgccacgtggaattgctcttccttcgttacatctccgactgggacctggacccgggccggtgctaccgtgtcacctggttcacgtcttggagcccctgctacgactgtgcacgtcacgtggcaaacttcctcagagggaaccccaacctgagtctgaggatcttcaccgcgcgcctctacttctgcgacggctacaaggcggagcctgaggggctgcggcggctgcaccgcgcgggggtccaaatcgccatcatgaccttcaaaggtgtgcggggctcccctccacccagctcagccaggcggggcttaccattgagagtgggaagagccagaggggaaattcacgggggcagaatcctgtgggtgttactagtttgcctttggagtcaaaaatgatcagctaagagttcctgtcgtggcgcagtggttaacaaatccgactaggaacctagaggttgtgggttcgattcctggccttgcttagtgggttagggatccggcgttgccgtgagctgtggtgtaggtggcagacgcggctcggatcctgcgttgctgtggctctggcataggccggtggctacagctccgattagacccctagtctgggaacctccatatgccacgggaagcagccctagaaaaggcaaaaagaccaaaaaaaaaaaatcagctagaattggaggaaaagaatcaatgacttggacccgaggctttgggggaaatgagaattgagggggccgggtttttctctctttcctcttgacttgagtgagatctgagccaccttctttctacccccttccccggccctttttttttttttgaagattacttttattgctggaatacttttgtggaaaatcgcgaaagaagtttcaaagcctgggaggggctgcatgaaaattctgttcgtctgaccagacagcttcgtcgcatccttttggtaagggacttccctgcttctcactgtctttctctcccaaagtcatcttttcctgcagcgacttctattgtttcctatattccctacattttcctctgtgcatatgtgtctatttatcactttttcctatgatgaaaactttctcttttttgttgtcatttctcctgtaattgagtttgctcttctgttatttcacagttcagagccctctgctaagattccctttccgtccttcccctttttcctcacccacatcttcttagacttctcaggatccgtttctcctggtaaaattccttcttcctacttcctctccctctcaacttactttcttcaaaaatgttaccaacgtcacccactctttctccacagcccctgtatgaggttgatgacttacgagatgcgtttcgtacgttgggactttgataccagcctccacatacaaagaaatatctctgaagatagtgggtaaaaagctatccttcaagaacagtccttcaagaattctgtttttcttcaactctctttcttttgagtttaggaaaaaaagtattcatatatgactttaagaaatgtcttgaaaatagacaacgaacacaggcccaccagggtaatgccagtgttggtgcagtttttagtgcaacatcgcaccctactgggagatgacagaactgcaggtccttggagcacctaagtgtcaacattaagcagagagaaagcagaaggtaaatgcttcaagagcagggtgaaaggatcaaatttttataaccaatatccttcattattagattctgagttttccatggtgttaatgatagattttttctactcttttcctttggcgttcatttgcaagtgaacaagcttctgtcaggctgtgctctatagaactttctaaggagagaacctgggtgatgataaaccctgagccatctcttcagagcattaatattcaagcatgtgctgtatgtcttaattgtctgaagcatgtttttcaggtttgtacataagagaatttgttttcttggtatgaaatgcacatggtcaccttcaggctctttataataaaggatcttaaaatgaatgaagaccttctaaaagtgaattgatgcctcaagtaacaaatgtgcaaacagatcttttgacagtaacttttgaaagcacacatttcccataaaactagtgaactcggaagggagttgcttgaaagctaagaaaaatctattctctttggtgggtttttgaacttcagtaaggccagccaggttaaggttttcccttttgtatgtatgcattgcttctctcaaagaaatgacagtgtaagaagctgtgattaaaaaaaaaaaaaaaaaaaaaaaaaaaagaatatttggaaaggatgagcattgtaaggaaagtgttttatccagcaaaatagcagagtgagccaacggcagagagcagttgtctgtccctaacaactcccctggactgtgagaaaatatcagaataaccatatatcactgtgcagttatcacctagcaacccttgcaaggcagataaacaaatccacaggaaaatttgaactcctaattgtattattctactcttactgtatgtatatagtttctgaaagttaattattaaaaatccttgttcatgtattactcattcatattgtatattgtgctacgtagtatctaatctttttttttatcattctttccctttctgatgtattgaaatggattcctaatgtcttacctttgaaaattccgaatgtttatacctttagaaatgcttctaatagcaagcatgtgattctgtcgtggtctagtattgtaataaaattgctataaaacca

SEQ ID NO: 70 - protein, 198 aa, Sus scrofa
MDSLLMKQRQFLYQFKNVRWAKGRHETYLCYVVKRRDSATSFSLDFGHLRNKSGCHVELLFLRYISDWDLDPGRCYRVTWFTSWSPCYDCARHVANFLRGNPNLSLRIFTARLYFCDGYKAEPEGLRRLHRAGVQIAIMTFKDYFYCWNTFVENRERSFKAWEGLHENSVRLTRQLRRILLPLYEVDDLRDAFRTLGL

SEQ ID NO: 71 - DNA, 4329 bp, Bos taurus
acagcctcttgatgaagcagagacagtttctttaccagttcaaaaacgtgcgctgggctaagggccgccatgagacctacttgtgctacgtggtgaagcggcgggacagtcccacctccttctcactggacttcgggcaccttcgaaacaaggtatcaattaatatcttgctattaattaattaatgcctgcttcccaagcagctacactgagggcacttttatagccacctgctgatgatgctactcagcctggttcatttgtctccattagatttctgagatatcttttctcttttatatgtctctgcacccacaatagacaggttccaaaggcggtcatttaacatcctcccgaatcctgctgggcacatcaaggccacactttgtttcagtgctaagaatcactgccccaaaccttcctctcctttccccagcatccaaattgcttttcagattaaggaagaaaccaaaagaaagagattttttatttgggggaatcttatcagctcattcaagctgaactgtaaacgtggaaaaacaaattgtggctttggaattttaaataatgaaggaagaagaattaggaaaaattaatgactcagttttatctttcaaatgatttctattccttcctgctcacctagatcataagccagcaagtacattcatcatagtgaccctcagaaaattcagggaagccatgaattaaaactagaagatcagaatttccctggggcacagtggagaagagtctgcctgccagtgcaggggacacaggttcgatccctggtgcaggaagatttcacatgccctggagcagctaagcccacgtgccacaactactgagctttcatgctgcaactactgaaccctcgcacccaagagctcatgttctgcaacgagaggccatgaatagataaataataaaaactgcttctcaataatatggcagcagtggtggtttagtcgctcagttgtctccaactcttgggaccccatggactgtagcctgccaggctcctctgtccataggattctccaggcaagaatactggagtgggcaagaatacttgccatttccttttccagggaatcttcccaacccagggattgaactcaggtctcctacattccaggcagattcttcaccaactgagcaataacacatctagcattaaaaaaaaaaaaaacctagaagatgggagaattacattttcaagagacttcatcaccaaaatccagaagagtttacataacatgcagttgacatgtggtcttggtggaaacgcagggaagaatccctgggcagaatgacactgacgtatctcacttttcttggcctctatttgtgttgtgttcattgtcccactgcaattgttttagcttctaatcttttccctatttggtgataagaaacattctaaacatagaaagcttttgtgttcctttccttctctctccctgagtcttcacaacaaaactccatttaacttatgaggaatcagaagatctaagagttgggtgacttatggaacttaggtcttcagattctgggagcaatgacttctctgcactatgaagtggacttgctatatctcactatggtgattactattacaatcatgggggtcatacaaagagcaaactcattacaggcacacctcggagattttgtaaatttgattccagaacatggcaataaagcatattgcaatagagaatattgcaataaagtgagtcaaatttgggggtttcctgaaagtgctagtttttcaatcctgtctgaccctttgtgaccccatggactatagcctgccaggctcctctagtccatagaattctccaggcaagaatactggagtgggttaccatgccttctccaggggatcttcccgatccagggatcaaacctggatctcccccattgcaggcagattctttaccatgtgagccaccaaggaagccctagtacatacaaaagttatatgtttacactatactacagttcttttaagtatgcaatacaattatatctaaaacaaaaagtgtatatcttaattttaaagcttaatgctaaaaattgctatcatctaagccttcaatgagtcatactagtagcaaagatcactgaccacagataaccataataatgaaaagtttgaaatttgcaagaatcacgaactgcgacacagagacacaaagtgagtggatgctgctggaaaaaatgacaccagggttgccacaaaccttcagaacacaaagtctctgcaaagtccaatatagccaagcacaataaaacaagggacccctgtatttaattgttcttaaaccacaaccggtgcctactacctcttttacaacacccacttgtcagtctcagactctcctaaccctaactttttattctccacttggtgtagtggagtccagtgtattttcacaacggttacatcaacagcacttccaagccgtttcttcctctccaaggaaggaaaagcaacttcacaaacaaaattaaatctgagatggtgtgatgctacttgacccactcaactcattccatcctcccactgttccacagaaaatctgcacccttttcccttcccaaagccaaaagtgcaaagagtttaggatcaccactcatcattatgtcctttcgggcagctgcttagcctttctgtaacctcggacaaaaccaaagacagacacgccaaaaaggctgaccgctgggagggacacgaattaatgacgatgaagctaccagcaggacagtcaaggtcggtcaccatcccgagtctctgctctctccccaggccggatgccacgtggagttgctcttcctccgctacatctctgactgggatctggaccctgggcggtgctaccgcgtcacctggttcacgtcttggagcccctgctacgactgtgcgcggcacgtggccgacttcctgcgggggtaccccaacctgagcctgcggatcttcacggcgcgcctctacttctgcgacaaggagcgcaaggccgagccagaggggctgcggcggctgcaccgcgctggagtccagatcgccatcatgacgttcaaaggtgcgcggggaactttcggcccggctctccagagcaggactggccattcagattggaaaaagccagggtgagagagagcgggcagaattctaactcgcccccaaagtcctaactcgccttttggggctgaaagctgtcaaggagaattggaggaaaagaatcggtggacccaagactttgggggagggggtggcagggttttctttctttcctcatgatttgagctctgacccatcccctcccctctcctttttaaattttcaaatagattatttttattgctggaatacttttgtggaaaatcatgaaagaactttcaaagcctgggagggactgcatgaaaattcggttcgtctgtctagacagcttcgacgcatccttttggtaagtgagggggctttctttgcttctcattttctttctctctccaaagttatctatccctggcactacttatatttcctacatttccgcgtgtgtgtttgtgtgtgtttatcattctccccttatttttcctgatgaaaactttctcttctctgtttttgttgtcatttctcctacaactgagtttgctctaatgttgtttcacaattcaaagccctctactagccctctggggtttcccaggtggcgctagtggtaaagaacacgccagccaatccagaagacaaaaaagattcaggttcgttccctgggttgggaagatcccctggaggagggcatggcaacccactccagtattcttgctgggaaatcccacggacagaggagcctggtgggccacagtccatagggtcgcaaagagtcagacacgacttagcccaagcaccagccttccagtaagattcctttcccttcccctcttccccaccctaatcccctcccctctcttttcctcactcacatctttaacttagactctcctcagaatccattttactgctaggaaaatttcttcctctctttctctttcctctccctctccccttcttttcttaaaaaatattaatgagaacgtccctggtggtccagtggttaagactctgagcttctggggcaggggacatggattcgacccctggtcggggagctaagatcccagatgtggtgcaaccaaaagatataaattttaaaaagaaaaaattaacacaaaaattacaaagtcacccactgtctttctccacagccactctacgaggttgatgacttgcgggatgcatttcgtactttgggactttga

SEQ ID NO: 72 - protein, 199 aa, Bos taurus
MDSLLMKQRQFLYQFKNVRWAKGRHETYLCYVVKRRDSPTSFSLDFGHLRNKAGCHVELLFLRYISDWDLDPGRCYRVTWFTSWSPCYDCARHVADFLRGYPNLSLRIFTARLYFCDKERKAEPEGLRRLHRAGVQIAIMTFKDYFYCWNTFVENHERTFKAWEGLHENSVRLSRQLRRILLPLYEVDDLRDAFRTLGL

SEQ ID NO: 73 - DNA, 21955 bp, Mus musculus
acccagaaatctctccttcgcgctccggcaggcgcagggtctgccttgaactacagttcccagaaggccactggagaagggcttcccccactttcccgggaccgcaattcccggagacttggtttcgcggcttttctctctgtgttgggtctctcttggacccggataggtcttgactggccagcaggcccacagcgacaacgtgctccgtcgtgtccagtcgcagggtgtactctttggccgggctttctgtctctttagctacttttgccggacaggccgtcgcagctggcctgagcagtgacctggcgggccgcgcctgcgccctgccgcgtttcctgcctggctggtggtggcggccattttgttcatcctcctcctcctcctgctcctcctggttggagcgcagtgtccggagcgggctggggggagcggacccgagagcggggttcagtaccttttcctctgtccccagccggcgcccggagcccccctccccttccttcccgccccctcccctccccagccctgccctcccccttgtcccgggatcactccgtcgcacccaccatgatggaagacgacggacagccccggactctgtgagtacccgagacccggggtgccaggcaccgagtggcccgggcactgcgggaagcggagggaggaagggagagcaggagcccgggactagaagcggagagccgggcgtcgcggtggcgcggctgtgaagtgcattcctcatctgtcccccttcccagagaaggaagccctcccttcccccccaaacacagtcacttcctagggtctagggcttgtctcgactttttcctcccgaccccttcttttgcacactcttgcttggctgggcttgtgcacggctgaggctgtcaggcgcgggagagctactgttccccctgtgctttgggggctccgggctgagccaggagctgtgggtccctacgggggcagggcttggcgggggtgggaccactactgcatcctttggcttgaacgtttagcctcagtccacgtcctcagcagtccacgtcctcagcctcagtcgctccgagtccttctccccagtctaccactctttaaccagaggagccccttgtctctttctgccccacgtgccccacgctgtcagaaacacccgcctagcgcctgctgcttttgaagtgccaaagtgattgcttttcgccaccgtgcaccacctctgtcccttggataacgaagtttactttgagcgcttactgcgccaacctgacaaccagttaaactcctttcgctcagttagtgatgccgcttcctaatccgtttgtgcgtccggaccatcggagttggataaaaggatgactgctcccgctatttgttacctgtcttttgagtgctatttttcgcggtatagctgtcgggtttcacctgaagcccaatctaatgaatgaatcgcatcttccaaccgcttaattggcgtttcctacccccctccgccggccccccctcccatgcagagtgatgactcagcgtctgtattcctttccaaatagtgtggcactcttttttttttttccttagtctgagtaatttccaattcattgtttaaagtgagcaccttgggttttcccagcctctccaggcctactactcctgcctggagtaaatacatagagtcagcctactgctttgtctctcttgcctcccactgcctagtattgattggtatgatggtcagagtccacttggctgggttagctgatggggaaagtactttttagggaatcgacgacggtggatagacattcaggacctctgactagctagcttctcagagcttcatgcgtagcacagaaaatatgttcagtaaagaaggtccatatgtatattcagtgttgataacagatattttttgagcattgtttatactttacatttttatttcgcttaacatctggcttgggaaacttgaaaacatctttttttttttttttttttttttttaaacttgaaaacatcctaaacatattataccccctgaatgaaaatctttctgtgtgtgagatcttccagcatctgggaaagctagcaagtatctgggaaggcctagcaagtatatattcaaggaagatgacagttacattgtatctaaaatacctgaaatgtcatcattgcatcataatagctactgggtaattggtaaattctcaggtctcattaactgcatctatttgttccttagaagaggtttcttgtttttgtctgttacatagtattccttttctgtttttttttttttttaattcctgtaatttctttgcatccactctatcatcttctttagaccagagctaaattttaatatttcatacatttatcatctcagatctcttgtctttttttctgaaagacatttcaggtgtctatgtttggttacctaaaactgtgatgtatacacatgagtgaataaacatcttagctctgttgttcctgtgtgtcagtatgtgttcatataccttccttttcccacttttctccatgggaagttgaggtggttttgttatgtttttaagtataaggactgtacagcttcctaggacttaacctttcctgcgcttagttcactctgaaaaataagaggtgctcaaattttttacaaatgtactttggttaaaatagtgttgtctggtttttaatttttttgattgatttaaattacaggtattgtcatacttcctgaagtttgtttatatatatatatatatatatatatatatatatatatatacacacacacacacacacacacacacacatatatatatgtatacatacacatgtatatattacatgtatatatatatgtaaacctaatgtaaagtctttacatcaaagtaaatgtttaataggatatgattttacttatgaagggcctatattttgcattgtgatctatggattaggcttctcaagtggctactatggttttaaataatgtactctaaataaagcttatcttaacttgtttactttaaaatgcctgtgtgttactagtaaggttttcttcctacagacacacacaagctaagacatatggttatcttcagaaaacaatatggtgtttatagcctaggtaggtttttaaatattcattatctacagtattactaatttatttgatggtatttaaagtggtatagaattgccttgatgttgagtctgaaatcctgtttgtcatatagatgctttaaaggtctgttttctggtgttctcattcttatttgacatttatttggggttattagtgatcttaaaaacaaaccaatgagatcatagtacttgaaatacttgtgtttgaagtagaccagccttgtaggatacacttcattcaaccttgggttgtgtttttgcactgtagtgatttatctgtggtatctgaacccacagttcaacactaaattatatcagtcaattgcagtttagtcatctgtttggtgtactaaaaccctagaaactgtggatctagggtaaaactaatgcaacccaataaggctatttattcttccttgatactcagtaaaaaagaggaaataagccatcaatttagagtgtgttctgaagatgtgtgaacaaagcagaagaaaacaatctaaggatctcatagccttgaccacaccattgatttagctgtattgtggctgtaatcaatctggttcaacttaatcatctttgtttcttcaaagtgtgtgtgggtgcaacctttaaaggtccttggtcaggttagttaccctactctactgtgcctttcttctactttgctgccttcctaaaatgaagtagtgacaacttagaccctttagagggctattgagggttattgttgaaaatcttttgtataggaacttgttaagaataatcaaaaaactacctttatggaaatgtagccccgttatattttgtttaaaaggactggtaatttcagttttggtggggttactttctagagcgagagcacatttggtggaaaagctgtcattagctttcttcaaggcacagtgtggttaatttctgcctagttggacataggaagtcgttcattggcagtgtgaacttctgcctgctgtgaaactgccaagttttctagtctccaatgacacttagacccaatgtcagggataaaggtatcattttcagttattaatgcttcagtccctacagttcctgttcttagaagacaaaatagactgtaaggtatgcattttccttatttttccttgagttaaaaatggttttggaatttcctgggtgttttctgttactctaagaactcaagccattctactgttttgtacatgttcttctggtagagactgcatatttaaaaacttggaactttagaatatactactacttatctgcagcagaaggtgaagtatagaaaatactatttggagagaaacatatcaattcaataagctaccaaagatgatgctagcacaatataaattgtgcttctattatatacataaattacagaacctttagtagaaaagttagtctaaagtttagataaatgtatttgaaattatatactggattgtgtccttttcatcttaacaaattacagtgtcctttgttatggaaggctttgtatgcttttaaaacttagtctgctttagcagttaaatcttaatttgaaaaaataggataactcagcactggacttttctataaatattccatggcattctaaacctaaatgttagcagttttgatctttgacagtgctaggtatgggaatcagttatatccctcacagattggaaacgggttgacttagaatgagaagcttgttaaataaaaacagcttttattgtgacttagctgtaaaaagtaacatgcatttttttcttttaagtgaatgttttaaaacattaacccaaacttaaaccagtttaaatcatcaaaactttgctatatagtaaaatgatgttctgtttattttttgttactagctagcttcacatttaaaaatcactgctaacccttgtcctcttccagaaatgagcacactagactgcttagatgaatatagtgtttagaaaatcaagattacttggtcattttctttatactgggtctcttacaaaagcaagttattccatagtcacaggctcataaagcccctatgagtgaaaaggagcaagtaggtgtttatagctagttcataatcctttaactatttgctgctactgaaaaggaaaaaaaaaatcactgcatggcctacagtgggtcagctccacttaagttataaggaaaagatggcatgctagaattaaaccagtttgtctgctagcttgttcttttatttcagtagcacaggacttgtgtttcagccttagaatatgtgccctgaggttgttggttaccactgtgaagttctcaataagctgggaagctgctgctcattttcttcttaatttttttttcatttttatgtgtgcgtgtatgtgtgtgtgcttgtgtctgtgtgcattatatgtgcatacatgtgagcacaaaggtgtgggaggaggccagaagagagtgttggtcccctggaactggagttagaggcattgtgagctgccagacctaggtgctgggaactgaactctgttctctgcaagaacatcaggcatgcttaatgtctgggccaccttcctagccccagttccttacccattcttaacccatctttttaggtttttcttatccatagctttctcttgcccttttccttttaacatgtttcatttgaaagctttttatgtatttaatgtggcaactgttgcaagcctaattttggtctcagcactgttttctaatgttgtattgtggttagaaaagtaaaatggtgtcctttaatttcccagaagaaactatgtcacattttacaagtaatattttggtttatgaaatggtttgtgaaaatgttcatttaaggtgtttgttgagaaccagaaagacttggcaatttaccgaactaagttaaacccatagtgtaagacagaaaaccaaggtagtcatctcttgggggtaaggtggtgacttttcttttttcttgttaacatttttaattaataggtaattttggaggaaaaaaatcctccaacttttcagttaaaagtattttttgggtttatcttaatttttctctgaatttctaaagaactcttcttaaacttttgttatcctcatgaagttgtattttgttgatcctgctacttttttttaatgaggaagtttaaattattcaattccctttttcttagagcagtgaaggtgtgccatccatcagtaacaggcttctttagccaaaagtgggacagaccccagcttccccaccccacctactttgttttgcagaactgaactcctaccctcttcttggttcatgttttgttttgcttggcagcgttaagatgagcccactaacaacgactgtctagtattagttcatcaagatgttttagtcaatcagtatttgtggtgtaaattattataaaatagagaatatagctattacagggctaggcatgactggataaatttatcaaagacagagacttgaaataaaagatgacaaaatagcaggttacaggtgcagctaaagaaacagtgctgataatgttttgttttttgttttctctctcagatacgtaggtaacctctccagagatgtgacagaagtccttattcttcagttattcagtcagatcggaccctgtaaaagctgtaaaatgataacagaggtaaggtcttcctggctagatgtgccacctgttaccctgatactgagcatttttagatgatacgtgagttgattctaaaattctaaagttcattttaacttaagcttcagattattctgttggagagattcctgtttgtggtgttgatgtaatccgttgatttggctagtaatctaggtatggagtaaagtctggtgtgagaaggccaagactgcactgatgttacacagccctgatggagttaccttcaggtgattctgcttgtgaacagtctgtctgggaaagatgacagatgatggtattttacatactccagtgcaaatactgataattcagtctacatttcaagttcaggtttggtatgttttgaagtcagcattcggttattatgtgtacagtggagcagcaagcatcttatgtatctttagaaaacactaaagcctgaagaactttgtgcagataggaatttaaatcacataatcattttacttgctctagagatgtagctcagtggtagagcagcatgtactcatgatatgcaaggcctgggttcaacccccagtaccaaaataaaatcttaacattttgtcttactttcaaagaaaaaaatttacttttctcattaagactctagttgtacacagtgactcctgtatcagttactcttttcttcctttctgcctgtttatctttttttttttgactgctgtataccagatactgtggtaagtgctaagaatctattggtgaataagagttcctctcctgataagattttagggctggtaggggactaaagtcaatacataggatatagaatagaaagctagggatcatttagcttaaagtgtggtgggaacttacggtgaatatctgctatggttgtgggtcatgggaagtttctactgggagtcagactggaacccaaaggattacagacacttgtgcagtgacgtctgaggaagaagatctgtgaagagaagagtgtcgatggagcctgtggtataagaggagtgcctgtgaaaaagagaaaccagaggtctctttcttgttagttgttttcagtagatgtatagatggagtttgaagtggaactagtcatagaaatgccagcaggtaataagacaagtgtctggaagggcatggaaccatactgctttctaaggaactggtgtttcagtctaaaatggggaactataaaaaaatctgtgaagaacattggctttttaatctcttaattgatgacacattctgttgtgtatatttttccttcttttcatttctaactttgagactgcattctttcattattaaaaatacttttcatgagtactattgaaggcactgtcaacacagtggaaaagcaaaggaagttccagatgaatagagagaagagccatggagtgaataagtgttctgtgatgactgagtggaggatgaggcagaggacacctcacctgtcttagtctaggcaagaatatcaagatgctatcgtctgagttaaagactaggacagaaggaaagcaaaacagcaaagccctcaacttgaaaagaggatgactggactctagtgagcatttgctgggaaagagtctagtaagacaggcaggattcagaatctcatagggcactatgggccagggcagagttgagattgtaatgccaggagaggtttaggcagggagaagacagaatctaatttgtaaatttaaaacggtctgtgtggaaaataatttgtagaggggtgtaggatacaagagcaggagaacaccaggtgggtttattctgcttgtctgaataagaaatgatggcttgctgggtgttagagcagtagtgaagaaagacagtgtgtacatcgagaggttttattttggaggtaggaacaataggactagaatgttataggaatcaggggagacttaagattcttgtcagtgcaatcatgtgggagtaaacatgcctcttgctaaaatgggaatgactgagaaaggcacaggatggatgggggagtggtggcaatcaagaattttgttttggcagtgttaaatttaagttacactttgcctatacaaatggaggttttatgtaggcagttggataagtgagtttgaaattgcagagagaacagtgctgaaggctatagtaacttttttaatccatggaactaggtaagattatgtagaaaaaggtgatagaggaaagtggagggcctgaggtctgagacctagaacttggaacaactcagcattcaagagtcacagacagagttaagctggagtgacaggccttctgaaacagcctccagtgaggaagtgggtcaccaacagaagagacgatttacaagagggaagatgatggtcagttattgtgaattgtgtggaagaagagagatcaggtggcagagaggtcactggtgagttagcgtgcagtttcagtgtctggtcagcttgatggcaatggctctgaatgccttcaggaatgcaaaggatggagaaaggaaagagtcacaagaatagtcttgattcatctgataaatattttttttttaatctgtgtgtgtatacagacatttgaggaatgagaagaactctttatagctaactcaatcatgtattctaatacctagatttgaacctgtagttttaaaatctgtcatatatctgttttgacatttatgttatccaatcagtaatggtgaccagagtcattaaggtaaggactcaactgattggtagagtgttgcttggcagtggtttaagtaggaagtttctaaaggacatagactccagaaaggactatctaacatctagtttccttttacacatttgattttgttatataaagaatactgagtagctgggcagtggtggtgcacacctttaatcccagcacttgagaggcagaggcagatggatctctatgagttctaggccagcctggtctacaaagtgagttccaggacagccaggactacacagagaaaccctgtcttgaaaaacaaaataaacagtcttgttttgttttatgacttctttttatttggtctgtattgttgagacatgtcttgctatgtagcagtgaaactcaccatgttgtccttgaacaagtggtgatattcctgagtggtggggttgtagtcctgggcaaccacatccactggctttgtttttttttttttttcttagctattattcatagactctagttttcactatataatggtatgcaatgtgtatatacatataatctctacttttaatacaaacattaaaaatttgaacctctgacagttgagtttaaacacggctcaatcagtgtggtgtgaatgtttaaatgcaatgtcttcccttacccaaggtcagcttcaaatataaatgggaatggaaaatttcacaagaaaacactttataagtttggtttttgtttttgagacagggtccctggctgttctggagcttgctgtgtgaaccagactgacctcaaactagcatagatccacctgtttctgtctcctgaatgctgggataaaaggcaggtgccaccatgcccatcccaattcaaaagttttgaattacaaatctgagttgtgtgatggaatctcttagtgtccagaatgacacaaagagttgtgtccaacatactcagattgtgcatgctacccaccattagtcacttagtaactgtcgtcagatgactataaagtgtctgtgtagtgctcatgctccaataacttgtacttaatgatggctccagtgtgaagtaatgctgacaatcagatcccaaagatcagtcataaagtgcttcctttagatgaaaaggtaaaaattctccagttaataagtaaagaaaattacatgttgagtttgaatatgaacagtaggagtgaatctttggtgaaagtgtaaaaaaatgaaaaaaataataatccaagtctttctgttgcccctaaaccccacttagggtgttcaggctgcagtgtgttgttaagaagatggactgggatttctggccagtcagagttatgtggtatttgtctcaaaacaaacaaaagatggaataggcattataagaaaaatagtataaagaggacttgatgctatcatagatttcaggcatctgttagggtcttagaacacattacccacagataaggagagccacaagacatgcgcacacagaatatgaaagtatcaatatgaacatataggaactggcctgttcctgcttagatgaaattggtattactctgaatgaatatactggtttcctaaaatctgtgtgatggttttatatatcattgtattaaaatgagacaggatcttactatataaccctagttggcctagatctgctgtgtagattaggctggcttcaaacttgaactctgagatccgcttgcctctgcctgcaggaattaaatatgtgctccaagattggcccaaattgttttattttttgtggtctgtctgcccatcgtcagtgagtgtatctggtaaatattcattcttccacacgcaggggacacctgagtgtttcttttctctgctgctttctttcgtcttctggctatgacaatgggattttgtacgagagagagagagagagagagagagagagagagagagagagagagagagagagagagagaatatgagaatattagtcttaggacattttacattaaatactgctgaatgtttttaacctgacataaaaaaattgagcattgagctgctgatccatataggtttcagttttttttttttttaattttttttaggtagcactaatttcttagcatccttattagttatgtattttccaactcatgaactttgttttttggttttttaacttggtgctttgtgatacgaatgtgtagctttgtcctgggtttacttagtatttatttagttccttggctttaagatccttggtagcaagtccatgccctgacccatgctagacacttgctctcccacccagctgtgcccaacatgtgctagaatatgtacattttatgcagcagttatattctagatcactagtgtgtttgcttgagactgaaagacatattcaaaatgtcattatattctacagtatattatgctttttttaaaaggtatgtcttttactgtgtgtgacctatggaggtcatgttggtcttcaacttctgagtctcctgcttctgcttccctcatgctaagattacatgtgtgtgtaatcatgccttactatcatgcctgtttgaaagatggaggattcattttattaattagtttcaataatttttatatttttatatttttcttctttatttcctcttttagaaaaaggactacattatatctagtctggttaacaatacaaatgctgtaaattgtagtgcttaccaccctagttttgatcagtggttaacatgaactcatttctatatagtttgtttgtttttttgagacaacttctctctagccttggctgtcctgaaactctgtatagaccatgctggatatagactatgctggcctggtcaacagatctgcctgcctctgcctcccaagtgttaggattaaaggtttgtgccaccatgcctggctacatttttgtatttttgtattttttcttacaagcctgaaatatagtatatgaaggattgtaatccataagtagaaatcacccttttaaaataattttggcgctggatgattgtggagtgtgcccttaacaccagcactcgggaggtggaggcaggcagagctcttgagtttgaggccagtctggtttacgtaatgagttcaaggacagaaagcagggtttctctgttttgaaaacaaaacaaaacaaaacaacccaaaaaacaataataattataataatgacgttgtaagaaaagagcagtgataatgagcagtcctcactaaatctgagggagaggtttaaaactaataagaggctctaccttattggacttacttccccagtcttctatattctaatttaacactcacagtcatgattctttactgtttgtatggctctgctggaatacaacagtattctgaggctcagcttaagtcttaagtgttaggctttcatagacttatggaatctcaccttgtgcattcctagctgtcagtaatgttttttcctggattttcttctcagcaacccgatagcagaagggtcaactcttctgttggattttctgttttgcagcatacaagcaatgacccatattgctttgtggaattttatgaacacagagatgcagctgctgcattagctgctatgaatgggagaaaaattttgggaaaggtaagacaatggatgatgacatccagtgactgtctatgtttgcatgttaaatcagactgtattctttcttagcaagattaaaaataggctactgagtggtctctattcagcctagtgcctttgcacaaataattcaacttgataggtgatttattaagtggtaagtgttaacagttcataatgacatgcctaataattgtattaaatataatctttgtttttaggaggtcaaagtaaactgggcaacaacaccaagtagccagaaaaaagatacttccagtaagtacttctgctgcattttactgtggaagtcgacaaaaccctggcagccttaccagcttacctaaggttttccctcctttagtgttgcctgacttcttaagtatttgattaccaaatgctttgatttcagatcacttccatgtgtttgttggggatttgagtccagaaattacaacagaagatatcaaatcagcatttgccccctttggtaaaatatcgtaagtatcgtaagcagtgttagactcagtagtggcaggcaggactggtgaggaacatggagtagagtcatggttttctttctctagttagtgtgtttttctttggtttttacttttcttttggtttgttttgttttttgagtagatgttgttgcaaatgttgatgtcatttcaatgtttggggtcttgttttcagataatcttgtgtataatatgtttaaaaattttaagtgattctgtttgttacatttaaagcaaatatttagatggtaaaacttctagctctttgtcaaatgttttcaaatattgatggttaagaatattgggttaatgaaaactaaatgttatcttaattgtgtattaaatttttattgaaggagtttttaagtggtgggggatctaggcaaatccttgtattttatggttaaattgcaaatgttcatatataatgataaatgcattttaagatttaactttgagaatatataatacaattgcaatattaaaatgttttcatgtctagataatagatatgagattaaattgacttttgttagtgacatttgattttgctagtgaggggacaaatatgggttgatttttttttttttaaatatgctcaaattttgttatttgattaaatatattggaaaattaaagatggttgcaagttctataaaatgtcataattttgattaaaatgaattggttatatatttgtcgatttaaattaaatgtataactacagaaatgttttaagaacaacaacttttctattaacttataacttgttgttctatagatttaacttattgtaagaaagatttaattcttaattttctattttgatatttgctttgctttttaatctaaatgtggtaagtaatactgttgtaaaattagtgtaaaatgatacaggttgctgtttttgatctttatttatacctgagacctgcagtttttctacagtccaagtcacaattaaaagtaatagcattctggttattttgcagaattgctcataagaatggacaggatcttgaaggctaactgcaaggaactgtgcacactggaactcagttgtagattttttttctcatttctatttattcttattatacattatttatatatacatattttagtatttacattttaacattctatattcagtggagttctatatttccaatcattttaacttactcactaaaatttctgtgtaaatttgttgttttcgtactggtgtgcttagcgttgttgttagttttttattctcctttcttaaatttctgaaaatgtcaatttttcaaaatttacagctgcccaaactccaaaatgatgatagagaattgaccaagaaaaataaagaaatctgttaacaggccatgtatgcctttttaattcctattttttcctctttttcaattttttaatatttcatatattttgtatcactaggcagaagacatttaactatttagatattgcatggtaaagtagttagcattgttacagtaatttatagaatcagtaaatcttagaggacactagcaaatagaatactagagaaggaaactgttgctcctgttaatggcagattagctcagtgtctcgctagaaagcacaggctctgtgactaggttgcatgactattacatggttttgtcctagtgcttttttctaacaggtaaagaagcattagggagaggtcagggatggctgtagttaattagggctaactggagtttacttttaagatgctcacaatacagtgtgtgtggttccttttagtttttatttggagggtgacttttacttccctcatttagctgtgcttcttttcacagggatgcccgggtagttaaagacatggcaactggaaagtccaaaggctatggttttgtatctttttataacaaactggtacgtcctttcatttaactcaattaaaatctccagttttggatttagttgcttcattaaaattaattattaaaacttaatgtgctagaatgttgacttagaaatagaacttttatataatttcttcagcatattagtaatagaaaataatttgttcttttgttaacttgaaagtaagtagagaaaggctaggatgataacacagtgaaggaagattactaaaccgtgtctgtgcattggtgaaggcatagtgagcagaagtgaagcccaagactagtggaagcaaatgaattatgagaattatgtttggttttagccaggaaacgtcatgtgttggacacaacagtgccagctttcctttgtcttgctaggtcttaggaagttttttcctttgtttctgatcgctgtataaaatttttttctttttctccacaggatgcagagaatgcaattgtgcatatggggggtcagtggttgggaggtcgacaaatcagaaccaattgggccacacgtaaaccacctgcccctaaaagtacacaagaaagtacgttagatctgtatatgtattgcaagtatagatgtgatcacaccgtgtagcattctgtctttatttcttagtatttaaattagtataagacccaaccttgaatttcattgtagaagctttagatataagttgagaaccaactggtttatttacagatgagatttctatttaaggctaaggcaatagctgagttggtagccgttcttgtgcttccctaagatgtatgaggctcctgggtttgatttctagcatcatacaaaccaggtgtgcttgctcatgcctatagttctagtacctgggaatggaggcagaaatagaagttcagagtcctcctcagtatcataatgagttcaagcttagcctgggatacttgagacctcacccccaatgtgttaagtcatagcattgagaaaaaaaagtgtttccctcccactggcatatatcttaacagtatatagccaggagtggtggagcatgcctttagtcccagtacttggaggcagcggtcagcctagtccacataggtccaggctacatagagattttaagatcctattaaaacaaagatttttaaaaattatacataagaacagaagtggatttgtgtgtggtgctggggttttaactaggaccttgcacatgctaggcaaatattctaccaattagctataaccttggctcaaaaagtagttttataatactgtataacaatccagatttcattttttttcttcttatagctaacactaagcagttgagatttgaagatgtagtaaaccagtcaagtccaaaaaactgtactgtgtactgtggaggaattgcttcggggctgacaggtgcagtgcttggtttcctagtcaccttctctgttgatattcggcactattggtatcaatttcatggttagcatgaacttaaaacagtttatttgtatatttttctttgtatagatcaacttatgagacaaacattttcaccatttggacaaattatggaaatacgagtttttccagagaagggctattcgtttgtcaggtatcgttcaagctatgagataattagtacttgtgagtcctcttcattccttttcacttacgttattggatccttactagatgttcgtttacctatggaatacataatttgagaaaaatgccaactgaaaggtgtcaattaatgagttcctgtgttctttgcccaagttcttcaaagatgaaggcaaaacttgactgtttcctcctagattttccactcacgagagtgcggcccacgccattgtctctgtgaacggcactacaatcgaaggacatgtggtgaaatgctattggggtaaagaatctcctgatatgactaaaaacttccaacaggtaattcaatttttcttagcatcttttaaggtttccatcttacatacctacataggagctttgggaattataaaataaacagtaaaataaagcatatagctgctttcagttgattgtgtaaaatgctatttcaaaattgttttatggtattaactgaatcttaatactttctttttacaggtgtcaccaccccaataaacttagacagtgatagataacagagtcctattcacagaagggtgcttacttagtttttctcttccttgtctcccactctttcttcaaatacggtgtttgttcttgttccctaaaacagtcatttgctttttcctaggttgactacagtcagtggggccagtggagccaagtgtatggaaacccacaacagtatggacagtatatggcaaatgggtggcaagtaccaccctatggagtatatgggcagccgtggaaccaacaaggatttggagtagagtgagttgttttggtttttccattgtagaaacagatgcgcttctggcaaaagatgcgcttaacagatgagcttctgtgttctcctaggggagagtctattggaatgattgtacattaaggcatttgggctgtagatgttacagtaacaaatctcaggaaatatggtttgtaatgcttttaattatagagatggggaatgcaatgtgacctcttggtagaatttgactcatctacagttgcattttcatttaattttgtgtatataaacatctttgtctagaatatgctcagaaacatgatgtttttgtattttacctttctaagacatctttgcaagttacatgacagagcagtttgctttctgtggtgatggtggagtggatatgttgcttcactttctctcctaggctgagctacacctttattttcactgtttaattgagaatactgcaaaagtcaatgctgtaacaagagtactgcctgctaagttgtttatttttatttttgtaagacaatgttttcactgtagcccaggctgacctcagacttagactcatagcagcagtcctgtcccaaccttccagttacaaggattacagctctgttgttgttgttgttgttactattattatatttttatttttgagacagggtctctctgtgtagccctggctgtcctggctgtttactttttgagatggtctcagtataaaccctggttggcctgtaattatatcaactggtttagcctcaaactcaaaaagatccacctgcttctgccttccacgtgctgggattaaaagtatgtgccatcatgcccagccctcattattattattattattttaaatatcagctttcaggtagtctgcagactggaggtaagttgtgatgatcttaacaaaatgcgctggttgtagggcatcgtatcgtgtaaagatacctggggctgacccccaagcacagcagtgtagtaaaagcaaaggagaggcagctttaaaacataatggtagtgtgtgtgttctgtttgttgtagatttgtggtttatctttatgttctgggattagactctgcctgagtttataaagctgtatagattatctttttctcgtgtttgctgaagattttttccccctttcttacaagtcaatccccttctgctgcttggatgggtggatttggtgctcagcctcctcaaggacaagcccctccccctgtaatacctcctccaaaccaagctgggtatggaatggcaagcttcccgacacagtgagctgggactcgaaacacgattgtaattcaccacaggctgcagtctcctgtcacactctgaagacatgaaaagtaaacatcggaaaatgaaaatatttattttaaaaattgaaatgtttggaacctttagcacagctttgcttggtgaaggacacatgtcttctagttctgcctttttaagtttttgttcatgatggatatgaacatgatttttctttgtgtacaaaaaactaaaataaagtcaataaagacaattctgactataaattttgatataataggagaaatgggtaatacacttcgatccttagacactattccatttttatcttgctgttcagtattttaactcactgtgtttttaaaagagcaaaaaagggagtatcgtgaaaaactgagaatcacatcagttcgtcctgaatcctgatactcccctcccgtccctgaggcggaccacatagaaggcagcaggagaaagtgtgatttcagaagaagtccatgatgtgggagtcgctgtggaagaaatatgttattctcttatgttaaagaaaatgaagccagactgaaagcgtgcagcctgaataaggaccagcatcgtagaaggttcttgaacgattgttggtggtccatattaagacatatttttaaaactttaaaagtgttggttatcaaaaatgtatattacatttcatttgggggaaaattccaagtatggtgtttatattaaagtcagacggtcatacttgtgcttttacatggagtttaaatgataaacattgtaaatattgaataactacagtgtttcaaaagcatgcttcaacatagaagtagcagcaatgtaattattcgaggtgacaagtaacatgctcgctgccagtgcagtgctcagtagcagtgttaacactgatgtctccacgtcttcacggttggccatgtaaaaggagaaggacacaaatgactacacagaagaagccttaatttaatttcatacaaatctttgatgcattagtatattctaaattgtaagtagaagttagatttgggcttttttcccctttcttcctttctttcatttccttttgttttgttttatttggtacataaataccttgattaaaacccagtgaagtgatttcagggttgctataagttgtatagcacaagttttttttttgtttttttttgtttttttaagaaatcttgggatgtttttaaaaattagtctattttgcccaagaattttcttaacaagattgctaaaacatcttacttagacaacctgatgtatcagttataatctgataaccaatttgagtcgtacacaagttgtgactttttatttctaatttgttttttctttgggagtgtgtgggtgacagatgtgaataggcctgagttgtatgtgtgcagttttaactgaatctttaggaagatgcgggagttccaggcatgctcccctgacatctttcagtctatgtggatacagtctgcctcatagttctatacaatgggaatgtgaaatagataaaatcctatgtgtttcaattgtgacaactaggaggtgcaaatgttttgatagtgtgttaaacctgttggcctgtgtatgcacaagagcaaaaaaccctaacctaaccttcttgaggtaagatgggtaagacacatgaagccgttgaagtctaaagattaagataatgtggttttttttatattggtgaccacaaagattctggagtttattccctccttcacttaggaacacagccaaatgtattcagcataaaaatgtacagggtctgaagttcttttttgagccaaaatctttatgtactttagttgggtttttttttttttttttttggtttttaaacacaactaccctgtgttaacactcgtcagtgactaaatagacccctggagttttttgatttgggtgttttgttttgtttttgtttttgtttttgtctttttgtcatacctttgggggatatttttggaaaagttattttatattttataagaagaaaacaagctatattttgcccttgagttaagattttcattaaattttgtgaaactcgaacaacctaaaggctttttaagttgataaattgataaaagcttactaaattaaaatttcagtttccctttttttcctctgccagtaaattaagtggcttactgagataactaatggctaactctagctgtagtcttttctcttttatatcctatgagttaataaaactatccagactagttacattgccatagtaagcatgtgactgacatcttttgtcttaatttggatgagaaaaaaaaatttttttttggtaagtcagtcacagtcatttcacagcaaatagttttaagatagaaaggacatgtgcaaatgaaatgcaccattttaggaaatgagatgatcaagctaacacaggtccagactgtcttacaatgcagatttgagtttgtgccctccgtccactttaagcctaagaactgttgccttttctttcctgtgttcgtcaagaacagcagagagactctttggcatgcaaggaaatgtctcttcatagtttcttgagatttatcttggtgtgtttctgcctgccatcgtctgtgcttgaatccttttctactagcatttcctcggtgccagtccgtctgatctttatgtttgccgccagtgagaggccaactaaagccaaagctgtaaaccacagttgaagtaagtctttcaataaagactagtctatgtaagtggc

SEQ ID NO: 74 - protein, 375 aa, Mus musculus
MMEDDGQPRTLYVGNLSRDVTEVLILQLFSQIGPCKSCKMITEHTSNDPYCFVEFYEHRDAAAALAAMNGRKILGKEVKVNWATTPSSQKKDTSNHFHVFVGDLSPEITTEDIKSAFAPFGKISDARVVKDMATGKSKGYGFVSFYNKLDAENAIVHMGGQWLGGRQIRTNWATRKPPAPKSTQETNTKQLRFEDVVNQSSPKNCTVYCGGIASGLTDQLMRQTFSPFGQIMEIRVFPEKGYSFVRFSTHESAAHAIVSVNGTTIEGHVVKCYWGKESPDMTKNFQQVDYSQWGQWSQVYGNPQQYGQYMANGWQVPPYGVYGQPWNQQGFGVDQSPSAAWMGGFGAQPPQGQAPPPVIPPPNQAGYGMASFPTQ

SEQ ID NO: 75 - DNA, 25942 bp, Sus scrofa
ggggaagtgcttacctctctcatttccaggaccacaattcccagagacttcagttttacggcggttctcttttttctcgagttcttcttgagctggctgggtttcgctagccagccggcgagtaacgacgacgtgatccgtcgtgaccgggcacgaggtttcctcagtggccccttttgttccccactcagttctccgctttttcaggccgtcgcggctggcctgagcggtgacctggcgggccgcgcctgcgctctgccccgtttcctgcctggctggtggcggcggccattttgttcatcctcctcctcctccagctcctcctggttggagcgcagtgtccggagcgggctggggggagagagcccgagagcagggttcggtgccttttcctctgtccccagccggtgcccggagcccccctccccttcctccccaccccctcccttccccagccctgccctcccccttgtcccgggatcgctccgtcgcacccaccatgatggaagacgacgggcagccccggactctgtgagtacccagacggggggtgccaggcgcctagaggcccgggcactgcgggatgctatgggagggagcaagagagcggggccgaagccaggactctcggcggctccctagctggggtggcgcggacgcgaagtgcattcctcatttgtccctttttccttgggaaggaagccctcccttcccccaaacacagtcacttcctggggtccggggctagtttcgaccttttcctctcgcgcccttctttgcaaccccgtcctgagccgggcttttgcacggcagagtctgtcaggcccgggagagctcctgctccccctgtgctttgggggccctgggctgggccgggagctgccggtccccacgggggctgggcctggtgggggtgggactgggggtgggactgcggccacatcccctgcgtgctgcgaggaattagcactcacgccctccacgtccccagctccagtcgctcccggctcttctcccaagctaagctctgcgaggaagccggacactcttccgccactcaagcccctactctctttctgccccacgtgcccccgcccacgctgtcagaaacactcgccaagcgcccgctacttttgaagtgcaaaagggatgcctcttgccgccggagcatctttcctttcttggatgacgaagtttactttgagcgctacctacgctaaactgacaaccagttgttaaacagctttttgctctattggtgctaccttctctattacatacctaatctatttctgcgtcgagcccttcggagttggataaaatgatatttttatcagctattcgatgtgtgtcttttgagtgctttttcttccaccttgctgttgctctttaccctgaagcccaaatgtaatgaatgaatttcatcttcccaccgctttccttcctttcctaatgaagagtgatgactcagcgtttgcattcctttccaactagtgtggcactcctttcttttttcctgcatttttttttttttttaagtgtgagtctaattaaatgtgttaagttgggcactgggttttcctcgccttacgaagctcaacacacctgcttcgagtacaaggagtcagtcagaacgctgcttttgttttctcttggctctgcctggtgtttatatgaccatagttcacttggctctgctgtctgatggggtaattactttttggggaatagatgcaggtggaagggtgctcaggaagtttgactagtttctgatctctactcctgccaaagaaagattgctcagtccagaaaatagatgtcttatgttcaatattgatagttgggattttcattttgttggggcggggggggttgcattttttttattcctatttctttaatgtctcactaaagtatctgctatactgttttgagaatttgaggccaacttaagcacatcaaatacttgaatggaaagcctgcttggtagaagttttgtatttatgtcctgtgttgtcttccatttctgctctattttcccagaagagagagaattgggacaaacatgaagtttgtcccctaacatctgttgaagtcaagacttggtatttagttagcagtgtgttctttgatggaagcatctgggaaagctggatttaggtctagctagtatgtgtttaataaagataaaagttacattgtatttaaaaatctgaaatgtcaccattgcatcctaatagttactgaataattggtaaattttcgtggcacatttctgattaactgtatctgtctcttccttatgaagaattcttggttttgtgctaaataatatgctatttcagtacctttaattcgtatcgctgtctttgcatctgccttgtcttcatctccatcagaccttaggccatagactaataagctaacgtctttgtgtcacttgtttcttacccctaccttctccaatctcctgttctttctcagaaacacacctaacttgtctatgtttacagttgtctaaaaaatgtgacatgtatacatataagtaaagaaacatcttgagcttcattgtacgtgtatgtcagtacatgtttactattctgtcttcctttttccttctcccactcttctccatgggaagggttttttttttttttagacaaggactgctacatcttcctaggtcttacccctgcagcacttagttcactgcctggaacataagaggtactcaaatattttacaatgattatacttcttttcattaaattagtattaagtccgttttttttaaagtcctgattgatttaaaattttaggcagacgtgactgtcatatgtggtgcagtctgctgatttttatgtatttttttaaaaccttcaaatgtaaaattttgagataaaagcaaatgtttcacacttggatttttgtcagattttaataaaaataatgcataacttttaaaatgttcgttttatgtatttcttctaaaagttcttttagatacaagtaacgtgataaaagcattgacagtgactagaggttgatacctagtagagttttttgtttatttatggccatccttcttttatttttcattgttatctatggattaggttttcaagtggctagtatgttttaaagaatgtactcttaacaagtttatcttaaactgtttccttaaaatgcctgtgtgttactagtgaggtttttttcctgcagacacacacaagctaagacatatggttctatcatcagaaaacaatatggtgtttatagcctaggtaggtctttaaatattcattatcctacagtattactaatttatttgatggtatttaaagtggtatagaattgctttgatgttgagccttaagtttgtcatatagttgctttgaaggtctgttttctgatattctttgttctcctttgacattttttggggggtaacatgtattggataactttgggatctaaaaaaaaaaaccaagcaaatgagatcttgctgtgttaacactggtgttggaggtggattgactgacacatagcttgtaggacccacattttagatttgtgttgtgggtagtaactttgagtgcagtgatttgatccatggtatatctgaatgtgttatataccacattaaaatgtaatagtgttcaactgtagtttaatttattttcttcatctatttgatacaccaaaatgagtagtaggaattgtggatctgggattataccatgttatgcaatgccaccttttaaggctgggttctaactgataagagggtcagtccaaaggaggaattaaaccattggtttagagcatgatctgaacctctaagaagggcaatagcagaagtaaatactattaaatcccattataaaattgattagctatatcatggatttggctataatatggctgtaattaagcctcccattcagtttaatcatattctgtttctttaaaatgtgtatgtgtgttgatcttccttatgcagcaggtctcacttgtacctcctgcacccttcctccaccctgcctcctttctaaaatgaaacatctgacaaattgatcctgttgcttagaggcccactgaaggatagtgttgcaaaatctccttttatataggaactttaaagaacaaaatcaaaaatgtttcttttttagaaatttagctttagtatcttgtgtaaaagtgctggtaatttcagcttttgcagggctaatctttttagagtgagagcacattcagtgtggaaaagtatgactagtcttctgaaaggcatgatgttcttaacttaaaattctgcccagttggacataggaagtggtttggcaatgtgaacttttgcctgctgtgaaaccgccaagttctagtctcaaatttgatttttaccctgttagggataaaggcatcattttccattattaatgctttagttccaatagttcttgttcttggaaaacaaaacagacctatatagtacgtgccacccctccccttgagttaaaaatcattttggaatttcataagtgtttactctttgaattgacctcaatatgagtttgagccatttgtctttttcttttattttgtgtatgttcttcaagtagagattttatatttaaacctttggaacgttagaatgtagtgactactttatatccagagtaaaaagaaagttaagtgtaaaaactatatgtgatttagaaaaaaaaagataatatttcagtatactaccaagaggtgatgtttttactaaattgggcgttgaacatttgccttaaatatttttgttagtatttattttgggatagataatttcatgataatgtcaagtccttaagctgtatagtatagtatttttaaaactataaaatgtttcttattaagtattacgatgatggcaaatgtagaggaatgaattacagaactcttaagtaaaggaaaatgtcagatttgggtaaaattaaggtgaattatatggtgaattatatcctttttatcttaataaattaagatgttctacaagttgttatggaaggccatttttatattagttttaagaatttgctgctttaccattgaacttttagtggagataatttgaaaaataggaaacctgaaaagtggactttttctataaatattttgtgacaatctaatcttagattaacattttgctctttgttattggtacttaaaatgtaaattaatgtatctaaatgtgcctctagaaattcttcagaagcacatttggcttggactaaaaatcctatgattggaaatgggttggcttggactaaaaatcctatggaacagtaatagctttaattgtgactgttaggtgtgtaaggtaaatgcctatgcagttttttttttctggaaaaaaaaataaatgtttaaacagtcacacagatttaaaattatttaagtcatttaaaatttattatattaagatgatgattctgtttaactttgctactaattaactttgatatgtgaaaatcatttttatccactcctattctgttagaaataagtagcactttaggttagattagtatttacacttcagagaccaattcatggtctctgttcattttctttatagataggtctaccttgtacgaagagaaattccatggaaattcaacacgttcacaaacccctatgagttttgttttgttttttatttaaataaagactactgtctgactagctcataagcctataacctttcatgactgctagaaaaagtatgcctttgggtggcctaccaatggatctgctctactttaaatataacaaaaaggtgcctagtttgtcactggtttagtctcccatttaagtaacattggacttgttttagttttaaagcatgttaaagttattagcactcattgcaacgaaattcttagctgaagaagaaaatggcaattcatacttagtcagatttttttttttttttttttggacatttaaccttacttttctcagtctgtttctctttcagaatatctctaaaagtatggcacccatagatgtaaggcttatattggtctcggtctcagtacacagtttccatatgttatatagtatagctaggaaagtaaaacttttgcccttctgctttccagaagaaactatgttaaattttacagctattgtttggtttacgaggatcataatatgtgaggtttaggaattacatactgagtattagagaggcttaaaagtttattaagctaaattaggatagatccatggtacgaggtggttatctttgggtagtgttttgttttgttttgttttttttcttttaaacttaactatatatttttttattttttagggccacacccttggcacatggaagttctcaggctaggggtcgaatcagtgttacagctgcccgcctacacctcaaccacagcaaggccagatccgagccgtgtctgtgacctgtgccacagctcacagccgcgctggatccttagcccactgagcgaggccagggatcgaacctgagtcctcatggatactagtcaggtttgttattgctgagccatgatgggaactccatacatttatctgtatttaaattttttaaataaaacacatatattccatttgtaatcttaaaaaaaaaaaaatccaaactttagatatgttgttgtagtcaaaaatatacctggatttgtcttaaatttttcctgaaatttctttttgtgtgtgtgtgtggctgcacttactgcatgtggaagttcccgggtcagggatcaaatctgcaccacagcagccacctaagctgctgcagtgacaatgacagatccttaacccgctgcaccacaagagatctctagaatctccagattttctctcagtttctaaagaaatctttatatttgctttgttatctacataaaaatgtattttgttgattctgatacattttagactaggaagttttataatttaccctgctctcctgaaacaaaacaatgaagacatagcaccaataacaatcctaatagcaggacagaacaaaacccttcaatctcttgtgtgttttactgtaactttaattctgctctttgttcatgtaattgctctggttgggggggggggggtctgagataaactcaccttttgtctgatatccctctgttcaggtgttttaatcagtattggtagagtgtgtatgtatgttattttgaatcgtgtttgacatctagaaattgtagttgataccggtttaaatttttattatttttttctaacaagatgagaaaatgacgtatagggtatgtggaatgctatgctttgggggtatgcaaggtcacgtcgatttgctctttataaagtcttttgaagtgatgttttagtagcctgagaacaattattgctttcctaaatgagagttaatattcaaaggatcaggcttaattggaaaaattttgttgaagacaggaagttaaaatgaaaaaaagttgataagtaaatgataaagttttagaaccagagctgaaggaagatcgctgacagtattttttttccttcctgtacagatacgtaggtaacctctccagagatgtaacagaagttcttattcttcagttattcagtcagattggaccctgtaaaagctgtaaaatgataacagaggtaagatcctcccagttccacgtgttgtcagatagcatgtgtttaacattttaagatacatgagtcaattagtactgttttaaacctcgagttactagatagattcttgtttgttgtgttgacttatttgatttggctgacagactaagtttagaatggagttttatttgagaggacaaagtttctgtgctgttactctcaaatgcttctttgtgatgtagttatcttcaggtgattctgcttataaaaattgttagagcgtatctcaaaatgttgaaaaactagatgatgtttcgtacatttccaataggagtgttacatttccaataggagtgttactggtgtgtgtaaaacatgaggttattatgcgcatagtgctacacaacaaatttgaacatttttagtaaatagtgactgaacagctttatgtagataggaatttaagttgttggaataataattgttttcttctttttccaaaaaaatcttactttttatcttttcttggtaaagaccgtagcagtgcccagtgacatgtgtttcagtttgtttttttcttttttgtttattaacacttggggggggtactagtatgtactggataccactataagtgctagaaatacagtgatgagtaagacagttccagccccatagaattttccagtctaatgagggagacagaggagttagcaaacactaatgatagaggaaaataaatgctgtggaaactgacaggttcgagtgctctggaagcatttgggtccatggtcttgggtcaggggaggatccctggaggattcagtgtctaggctgaaaactgaaagggatagttgtggaaactgactagataggaacttgaggaagaagggattccaggtagagagaagagtgttgatcttgcctgatagacagagggcaggagtgtttgggagataggggaaaagatagaaactgtaacaaggctagagtttcaaatgggattaagagatgccaggactgttaaaaacctacaaagcaaattggccttttgatttttcgtaactaatgataatcatcattgtgttatattatatcttcttttcttcttgtctttgattatatgcattctctcattaatcgaaattttactttgttttggcactattcaaagcataatgcagaggtagaccagtgagggtcccagcgtttgcatattagtgagagtcttgtagatagcaggtaaactagataattccagataggaataagagctatcaagagaataaaacagttgatggcagttgatgggagtgttggtgctctgtaggctgggtggtgaggggaaaggtgtcttgctgcagttggcatctattttgtgaatgtaacaatacagtttcttaaggagacaggaactaaagttccctgatttaatgttgaggctttttggttatggtttgtggtctagaaatctctcttcagcaaacatttgctccaaatcaaattttaaaagaacaaatgagtcttattagactggatgtttgctgtgggatccaatgttgagtactatcagaaatcacctcttcaggggttcccactgtggctcagcggtaacaaacccagctagtatccatgagggctccagttcgatccctggcctctcccagtgggttaaggatttggcattgctgtgagctgtggtgtaggttgcagatgcagcttggattccactttgctgtggcttttggcataggctggcagctacagctaccattggacccctggcctgggaacttccatgtgctgtgggtgcagcccttaaaaaagaagaaagcaagcccgcgttgctgtggctctggtggccggcggctacagctccgattagactcctagcctgggaacctccacatgcctcgggagcagccctagaaaaggcaaaaaagacaactaaaaaaagaaaagaaaaaaaaaaagaaggaaggaagaaatcaagaaatcacctcttcgagctgagacaggaatgacaggatggcaccatctacattaagagctggaggccttgagttggtaatgagcttggtgtatttgtagaaccaaagaccagagtggctggaacctggtgaatggtgagaaatgagtctaacgaggtaggcaggcagggtccactagggcagtaggggccatgacaagagtgttcagattttactctgattgcaggaagggtttttaaaagcagggtgttaaagtactctttatttgcattttaaatattactctatttggaaaatgagtgttgtatgtagaatagattggaaggggcaagagtggaaggagagggaaaccagctgggtttaatttcactagtctaggtaatagatgatgtggagggcttgttctttcgggtggtagccatagacatagagggataaatttgggatatattttggaggtagaatcaataggactggcttggctgtgggatacagggaaaggaagacatcaagaaagacccctaaggagttcgcgctgtggtgcactgggttaagaatccgactgcagtgtgttggatcactgcagaggcacgggtttgatccccagcctggtgcagtggcttaaagcacctgactttgccacaggtgtggtttaagtcacagctgtggctcagattcattccctggccctggtggcttccatatgccatgggtgtggccataaaaaaaagatgggagttcccattgtagctcattgggttaagaacctgactagtatccatgaggatatgggttcgatccctggccttgctcagtgggttgtggatctggggttgccacaagctgcagtgtaggtcacagatgtggctcagatccaacgttgctgttgctgtggccatggcgtaggttggcagctacagctctgatttgacttctagcctgggaacttccacctgccatgggtgcagccctaaaaagacaaaaaaaaagaccaacagagacccatgttgatgatactagcttgcaggggtttttgaagccatgggactgaatatggtctagttcctatatctagaaagtgctgatagagaagagtagaggggtctgagttcaagccctgaagcatctcaacacttgtgtgacatttatagtttgagtttaggaggaagagataccttcggaaagatcctccagtgaggaaacaggaaaaccaagagaatatggtagaatctataggagaatgtttagaagaggaggagagtttgagaaacattaggtaaagatttattttagcagtttttgtttttttttaacttgtgtgtgcacagccacttgaggggtagagggatttgaaatgaactttcacaacttacctgtgttctacaactcctacatttgaacttgtaaatagttgtaaaattttctctctcttgacatttatgtcatccaacaaaaattggtgacagttggagtttccattgtggttcagtggaatcgaacccgactagtaaccatgaggatgtgtgttcgatccctggtctctctcagtgggttaaggatccggcgttgccatgagatgtggtgtaggtcacagacgaggctcagatctggtgttgctatggctgtggcataggccagcagttggatctctgactccacccttggcctgggaatttccatatgccacgggtgtgaccctaaaagaaaaaaaattggtgacaacaccagaataaggacacagttgattttagagtgttacttggtggtggtgtaaatgggaagcttgcaaaggtgtggactctagtacatactattattttgttttttatttgcgggttttgtttttttggtttttttttttgtctgtgcctgcaacataccaaagttcccagggcagggatggaacccgagctgcagcagtgatggcaggtccttaactgctagtccaccagggaactctagagtattattttcttttcataaattttatttttaataaatgcaaaatctttttccccttaattttactttttttttttttactttagttactgtttatcttagattctagcctgccctgtatactatcgtaagtatatattatcaattctaaggcgaatgttaaactttaacatttctggcagatgggaggtgacaaaaatcagtggtatcttcagagagataaaatgcagtgtgaggagttcccgtcgtggcgcagtggttaacgaatccgactaggaaccatgaggttgcgggttcggtccctgcccttgctcagtgggttaacgatccggcgttgccgtgagctgtggtgtaggttgcagacgcggctcggatcccgcgttgctgtggctctggcgtaggccggtggctacagctccgattcaacccctagcctgggaatctccatataccgtgggagcggcccaaagaaatagcaacaacaacaacaacaaaagaccaaaaaaaaaataaaataaaataaaataatgcagtgtgatgtaaatatagtagtggaatgtgtgtgtacatgcacgtatgtacattgaatgggatctaggttactagttagacttctgtgtattttgttacaatgatcagtgttttccttagagatctttagggcaggaaaggtaggggaagttgactagcaccaatttatttatttatttatttattttgttttttttttttttttttagggctgcacccacgacatatggaggttcccaggctaggggtctaatcagagctgtagctgccagcctacgcttaacagccacagcagcgtgggatctgagcagggtctgcgacctacaccacagctcatgcaacactggatccttaacccactgagctaggccagggatcgaacctgcatcctcatgggtactggtcagattcatttctgctgagccatgacgggaactccagctaacacaatttagcttcttctttgcctttaaatccttcagtgaatggcactggtaagtgttaactcctttacaagaggaatttgagtgcgtttctatttggcctcttttctatttcctttctctgccttgtaagaacagcattcacgtggctacaacagtaggattttgtatgggagcccatagttttcttgtcagtattaatgattacactttttttctctcaaggaaatgccttctggttgcttcaccactattgttttagacgtcttattttggatttttcttccaaaactttcctggaatgaaaaacagtggttgttgaaaagagctttattttatctggtattttaatcccttgtaagtgcaactggaattctacattttgaatgttttttagggtgttttacagtgatggatatttttaaccttatctaaaaaatgtgtttgtacagtggtataactattcagtataggttatattcttataaaattcatttccattttggttgatagtgatgatatacttactatactttaggtactttctcatcgtccttataaatatctgtttgacagtgaccatcaagcatagtattgcagaatataaaaataaagatttctcacattggtgtttttgtgatataaaattgtagctttgtcttagaatattttattcacacacattttcagaaaatcttttcttcatcactagtatatatatatttttggtctttagaagaccggattcaaagtgaatagaatctctagtgctttcgaagattttaaaaggtagggaattcatttcagcagctggttataatctgaatttcttctgttttcactctcattccttccttatccagaaaagaaatacgtaatctcatctcatcatatatagcactaatcctagtttcattcaggagtaaagtttgtaaagttggttcatttctgtatttttttatagtcatgggatacagtttatgaaggattatgatgcataagtagaattcatccctttgaaaataatgttgggagagaagagcagtggtaaggagtggtcctcatctatcaaatctgaacttgaggttttgtttggtctaatataaacttctattttatattcagcatacttcaccagaattttgtatttcgatttaatactgatagtcttgattctgtgttccattgtagttctgtttgagtacaacagtattctgaggtgcatagtcagttgtaggtgtaaattttattttgaaattgttaggctttcataagcttgtgcagtctcacctcgtacattcctagctatcagtaatgttttttcctggattttcttctcagcaacccgatagcagaagggtcaactcttctgttggattttctgttttgcagcatacaagcaatgacccatattgctttgtggaattttatgaacacagagatgcagctgctgcattagctgctatgaatgggagaaaaattttgggaaaggtaagataatagaatggtggcaccttatgaatgtatatatttgcatgtcaggttattttgtgttcttcctttagcaagtttttaaacaaatattcagctttgccaagtgatggttttgctttattcagcctagtacttttaccaaaataatcctgcttgataaatgatttaataagtggtaagtgttatgattcacagtgaaatacctaataattgtattaaatataatctttatttttaggaggtcaaagtaaactgggcaacaacaccaagtagccagaaaaaagatacttccagtaagtacttctgctgcattttactgtggaggagttctgaaattatcctggcagcattaccagctcaaagagggttttttcttcctttagtgttgcctaagaaagatttcgtcgctaacttcttaagtatttgattgccaaatgctttgatttcagatcatttccacgtgtttgttggggatttgagtccagaaattacaacagaagatatcaaatcagcatttgccccctttggtaaaatatcgtaagtatcataatcaatactatacccagtagtgataggcaagattgtatatgattaacttgtatcagaactaagattttctttccctagttagtgtgatttttttgtttgtttgtttggtttgtttttttgatcagtaggtgttgttgaaaatgttaatgtcatttcagtgttttggggtcttgttttcatctaatcctgtgtataacatgttaaaaatttttaagtaattctgtttgttatctttaaagcagatggttgggtgataaaacctattataaaatctagctttttgtcaaatgttttcagattttggtggttaaagaaatgggttaaacaaaaataaatgtgatttatactgtgtattaaacttttataggagtttataagtgggggaagtaggtaaattttggggtgtgctgtggtgaaattagaaatgtatatgtttaattataatgataaatgtgttttgatattttagctgaaaaatagcactattacagtattgaaatgttttaatgtctgagccataaatgtgggattaatcagtagattttttttttttttttttttttgttagtggtatttgattctgcttgttagggcccaattgtgatttgatttttttttaaacaaagtttatgatcagatttcactgtgttactttatcaactatattgggaaattaaaagtggttacaagttgataaaatgtttgtcatagtttatctttctgattaaaatcactttatttcctgtggatttaaatttaatgttttagtactactttacagaaatgcttcaactaagaacaacaatacatttctctctataatttgttgttctatagagtttattgatagatttaattcttaattttctattctgatatttgctttgctttttaatttctaaatgtggtaagtagtactgttttaaaaatcaatataaaaaataataaaggttgctgtttttcaatctttatttatacctgagacctgcagtttttctgaagtccaagtcacaattaaaagtaatagcattctggttattttgcagaattgctcataagaatggacaggatcttgaaggctaactgcaaggaactgtgcacactggaactcagttgtagatttttttctcatttctatttattcttattatacattatttatatatacatattttagtatttacattttaacattctatattcagtggagttctatatttccaatcattttaacttactcactaaaatttctgtgtaaatttgttgttttcgtactggtgtgcttagcattgttgttagttttttattctcctttcttaaatttctgaaaatgtcaatttttcaaaatttacagctgcccaaactccaaaatgatggtagagaattgaccaagaaaaataaagaaatctgttaacaggccatgtatgcctttttaattcctattttttcctctttttcaattttttaatatttcatatattttgtatcactaggcagaagacatttaactatttagaaattgcatggtaaagtagttagcattgttacagtaatttatagaagcagtaaaccttagaggacactagccgatagaatattagaaaaggaaactattgttcctattaatcttcaaatttgagcatttagtttagaaagcacaggctatttgattaggttgcatgtttattacatgtttttgtcctactgcttttttctaacaggtaaagaagcgttagggagagttcaggaatggcagtagttaattagggctaactgaaattttatttaaaaaaatgctcacaatacagtgtgtgtggttccttttagtttttattttgaggatgactcttacttccctcatttagctgtgcttcttttcacagggatgcccgagtagttaaagatatggcaactggaaaatctaaaggctatggctttgtatctttttataacaaactggtatgtttttttaactcaatttaaatttaatacaagacttagtcattaataaatatttttggatgttaactgtaaacaactgggagtccctttgtggcaaagtgggttaaggatctggtggtgtcactacagtggcctgggttgctgctgtgacacaggttcaaggaacttccgcatgttgcaggcaggaccaaaaaaagcctacaaacaactattgtgtagctttgtctgttttaataatagggtatagtttgttcttttcatttgtaagcttggaaataactggggaaacagaggttgatacctatattcttccttacagagtgttaaagtttgcatttgtgacttggtaacaataagatgtgtgatagaagtaaagctcaaaactggaacagatgagctaatctcagaatttggaaggaagttaaattatatttatcctaaccacaaaaatcttagttttagctttttaattattcatatttttgtaggtgggatattaatgactacagcaaattgtgtaaatgaaaatttaagcaattcctcttgatttttgcatgtatttaagaaaggggtaccaaaatatcttaagtattcacattaaatatagcatcagataataaaatgggcgttggggagttcctgctatggagcagtgggttaaggatacattgttgctgcagctgttggcgtaggttgcaggtctggctcagattcgatccctggtctgggaacttccatatgccacagatgctgctgagaaagaaaaattattggcagccgttttacagcattctaaatcataatgaagaagtcttttgtcttaagttttaaatcttgtgttatagtcaaaatctgttagaatgtagattgggggagtaggttgaagagtttttttagatattcttcagtaaaaatgttatattacaaatcaactgttaaattaagatatttgaaaactttgtccttttttggtaatcagtgggagtgatttttctttgcatatttgaattacagattttttttgtctttttttagggctgtacctgtggcatatggaagttcccaggctacaggtctatttggagctgcagctggcagcctacaccacagctcaatgaggcagcattgagcagggccagggatcaaacccgcgtcctcatggatactagttgggttcattaccgctgagccacaataggaactcccaaattataaatttttcttgatgcttaaatgctgtcctggtataaaaatggctttaatgaatcactcgagttcagttcacttgtgaaattcagttttattttaggatgctgagtgaattcatttactgataagatttattggatccagtggtgccagcgttttgtttcatcttactgggtcttatataccaccattttctgtgtttgtaattgctcttttttttatttctctctttttctctgtaggatgcagaaaatgcaattgtgcatatgggaggtcagtggttgggtggtcgtcaaatcagaaccaattgggccacacgtaaaccacctgcacctaaaagtacacaagaaagtaagaaatgtctgctttacatgtttttatggatacctcaaaaaatcatgtgtttagtcttaatttcttaaaatttgaattttattagtattctaagactcatttcatcttcagtgtaattgtctgaaagtaactgggctttgatgtaagtatatttggagttgtgaatcagcaaattttacaggtcaagtcatagtgtcaagagaaaaaattctgtttctccctacattgaggcacatcttaatagtatacagtaatcagtttcacagtgctgtataactaccaacatttttggtttttttctgcatgtagataacactaagcagttgagatttgaagatgtagtaaaccagtcaagtccaaaaaattgtactgtgtactgtggaggaattgcttctgggttaacaggtatagtgtctggttttctaattcccttctctggagctgcactgttagtattttcatgataacatgaaccttaaattatttgtatgtttttgtttttcagatcagcttatgagacagacattctcaccatttgggcaaattatggaaatcagagtttttccggagaagggctattcatttgtcaggtaaaattctacgtatagttttgttacttgtacatttgatccatttctttcagttatatcatttgttcccttcaggtattagagtttgttattttaggacttcgttgcaatgtagaactataaactaccttcatcatgtactttagttataaactaatgagtttctgtgttactaagttcttttaaaaaatcaaaaacaaaaaaacctcattctctttctcttagattttccacccacgaaagtgcagcccatgccattgtctcagtgaatggtactacgatcgaaggacatgttgttaaatgctattggggtaaagaatctcctgatatgactaaaaacttccaacaggtaattcgatttttcatagcactttttaaggtttccatcttacatatctacataaaagctttagaaacaccatttaaaagaaaacaaagtgaaaaacaacaacaaaaaagcatttagctgctttcagttgattttgttaatgctatttcaaaagtgattattttgtggtattaactgaatcttaatactttcttttcacaggtgtcaccaccccaataaacttagacaatgataaataacagagtcctattcacataagggtgcttacttagtttttctcttccttgtctcccactttcttcaaatactgtgttttctttcttgttccctaaaacagtaatttgctttttcctaggtcgactatagtcagtggggccagtggagccaagtttatggaaatccacaacagtatggacagtatatggcaaatgggtggcaagtaccaccttacggagtatacgggcagccatggaatcaacaaggatttggagtagagtgagttgtttgaatttttctagaatggaaatagatatgactgtgacaaaaggaattaaaaagtgtgtttttctaaggagagtctgcttaaacattgaactatctggcatgtacaggcattgtagaaaccttatgcaaaaggatttgtaatgctaaaaatttgctttttattatctaggtagaaagggaggttggggtaataacatttggtttgtcctactatctctgtgagtagttggtagaatttgatttacatttctttttctttttttttttaagtgctgcacccgtggcatatggaacttcccaggataggggtcaaattggaggtgcagctgtcgccttccaccacagccacagcaacaccagatctgagctgcatctgtgacctacaccacagctcgtggcaacaccagatccttaatcactgagcaaggccacgaatctgtgtcctcatggatgctagtcaggtttgttactgctgagctacagcaggaactcttagatttttttttttttaatttgcttttttagggccgcacccgcagcatgtggaggttcccaggcgaggggtctaatcagagctacagctaacggcatacatacatacagctgcaagcaacgccagatccgagccacgtcttcgacctacaccacagctcatggcaacgcctgatccttaacccactgagtgaggccagggatcgaacccaagatctcgtggttcctagtcagatttgtttcctctgtgccgtgatgggaactccctacatttctaatatactattttatctacttgtttatttttgtttggaaaagatctttgtctaggtgtgttcagaaatgatctatgcctgttggcttgtgtgagaagtctctgagatttatctgatacaaagcagcttgcttttcttcctttgttgatagattgtgttggtcccttttacttttccccccagaccagcccagacctttattttcaccaattccttctctttccaatgtgaacttgtgtctttaaaattgtttatagggaattcctgttgtggctcagtggtaacgaatccaactagtatccataagggtgcaggttcaatccctggcctcattcagtgggttaaggatctggtgttgctgtggctgtggcacaggccggtagctatagctccaatttgaccgctagcctgggaacttgcgtatgctgcaggtgcagccctaaaaagcaaaaaaaaaaaaaaaaaattgcttataaactgatataccatgtgtgtatgcagtacatgcgtcatacaccgtgcagtagatgaagtgttgaatcatttgtcattttttaagaatcagttttgagatactttggatactttttgtagaagtcattatgttgttatttaagcacaaatttaagactgatattggagtgtgtacttcgcatatgtggatgaagtgtcatttatttctttgctctttgttgtaggtatgttgatttcttgtctattctataaagcagcttgatttttgcataaatttatgtagataattttttctttgtgtttgctaaagttttttttttttttttttttcttccttgcaagtcaatcaccttcagctgcttggatgggtggatttggtgctcagcctccccaaggacaagcccctccccctgtaatacctcctcccaaccaggctggatatggcatggccagttaccaaacacagtgagctgggactctaaacaaaatgtaattcatgatagcttcagtttccttgtgacattctgaagacatgaaagtagacatcggaaaatgaaaatatttattttaaaaattgaaatgtttggaacctttagcacagctttgctttggtgaaggacacatgtcttctagttctgcctttttaagtttttgttcatgatggatatgaacatgatttttctttgtgtacaaaaactaaaataaagtcaataaagacaattctgactacaaattttgatataataggagaaatgggtaatacattttgattcttagatactattccatttttatcttgctgttcagtattttaactcactgtgtttttaaaagagcaaaaaagggaggattgtgaaaaactgggaataacatatgagttcatcctgaaccttgatattcccttcccctcctctgaggtggaccacattcgaagtcagcagaaaaaagtgtgacattgagaagagatgcatgattttgaagtcgctttggaggaagtactttctctgtgcctaaagaaaccgaagccagactgacaaaagaaatttgccatctaaataagggacagcattgtttcagttacttgagcaaatgttggtggtccacattaagacatatttttaaaactttaaaaagtgttgattattaaagctgtagtgaattacatttcattttggggggaaaattcaaagtatggtgtttatattaaagtcagtcatacttatgcttttacatgaagtttaaatgatatacattgtaaataattgaatacagtgtttaaaaagcatgcttcaacatagaagtagcagtaatgtaattatttgaagtaacacttaacacactccactgcattgaatgcaatggatgaataagaatgtttaagactgacatttccaaggttggctactatgtaaaattaaaattatacaaattactatacagaaaaagccttaactttaatttcatataaatctttgattcattagtacattttaaaatgtcattgaaaattagatttttttttctttttttgctttacatcagttggtatgtaaatacctggattaaaaccttgtaaacctatttcaaggttcctataagttgtaaagtacaactgttttttaaaaaatcttggggtgttttttaaaattagatatattttgcccaagaatttttttaacaaaattgcttaaaaaaatcttagacactttgatgtaccaatttataattggatactcaatttactagtacacagagttgtgacttttatttttaattaatttttttccttgtgggtagtgtgcatgggatgataagcctgaacagaggctgagttgtatgtgtgcagagttagtaaacgaattgattgggtaggtgtatatgattgatgtttgcttttgaggtatttttcaggccatgtggataaaatctgtctcaaatttctatcgtaacaggaatgtaaaagagatgaaatcctatgtatttgaattctgacagctagggggtgcaaatgtttaggcagtgtatttgaaatgttttgaggcctgaacaccaaaatgagaaaactctacagttaagtaataagatgcaaatagcacccacaaaatactattttttaaatgtttgaagctacaatttgctttaaaatgatggttttataaattggtgaccacaataattttggtattttccttcttcccccatttagaaatgtattaaacataaaattttacagggtctgaagttactcattttcaggccaaattttttatggcactttagttttaaccacagtactcatctattattacactcttattttaaaatttacccttagttttttttgttcatggttagcatctttgggggatgttatggaaaagttactttatattttataaggagaacattcaaattatatcagttatgcctcctagttaaacatttcttaaacatatgggaaacttgaattaaagattttttttaatatatattgataaaagcctattaaactctcagtttgccttttttggtctaccagtaaattaagtagcttattgcagtaccagctaaatatagcttcagtgtttcctgattgtatgttctacagtttaataaaatgacccagaccagtaatactgcatagtaaacatgactgaagtgtccttcatcttaatccgaaagaccgagactacatgctcagttcaggtgatgggagtttttcatattaaatggtttttaaaatataaagctacttatccaaatgaaatgcaccactttaaaatacaactgtcaagctaacgcagactgaagaccataatacaaactgaagtcagtgctatcttgatccagtttaagcctaagaatcgttgccttttccatgttccttaaaaacagcagcagagattctttggcatgcaagaaaatgtttatttcataatcattttctgatctgatttatatttggtgatgtgtttctgactgccatctcccttgctctaatctctctactagtatttcccctcccatgccatgaccacttgatttttatgcctgctggcagtgagaggctgaaatgactggccaacttaagccaaagctgtaaaccacagttgaagtaagtctttcaataaagacgagactatataagtggctttttcttattgtcgtttattacataattattccttccaggctgcaattccattttaagttattaataaggtatgtagagtgtttatatatatccaggacctatatctgtctttcgtgtaagtgataaaatctgtttactttgttggattaaatttaatttctggatatggagtagagatttgcatccttctaaagacgtatgctctgttgaatattaatatagtaagagctcattagagtccacaaataataggaaccatcattttaccatttctagattgatctttggtagtacttgtgagtaaagattgcattcaacagacaaagtagaaaaatttaatatgtagacagacactctctagcaggtatacccaaatttaaatcttatctatttattgaaagttagcgtttgggcttccatttaatatgatgtaaacattgaatttgcacttttagtatgtgttagaaagatgcaaaaattatttagacttttagtattatgtaagtttctcaagaggtccaaaagaccgggttttgttaaatatgaattctgctgcatgtaatggtcatctgctaatgtccagtgttgttcaggtgtatcacagtaaattatgtttccgtctattgcatttttaaactaggaagtgtcagtaattacgacattttaaaaaggtgttattctaaactgtagtctaatatggtatgcaaatgccatgttagtatgaaaaatgggcttgtgcctatgtaaattgggtctgttttggggaagagggaggtctgtttttttgaattagtgcagatacactagaaactgtgattcacaaggtactctgtgtaagtacctcttttagggacaagaaaaacttgattttcgaattgctccaatgtgaaaagttcattttatatctaggaaatagacaaaggggaaattaaatatatttttttatcttaggcaaaaaagtgggggagtagggggttttaatactcattgatccttttgttgaagtaggcttttgtcctagggaaaagaatattaatctgtataacattcatagtttgttttttaaataatgtggcttagagtaacagctgacaataagtgtgtattcaataagttatttccttagtgttccaactcagttgtaatacatattgctacatttgcatttttctagattgttgctcttttcaaaattcagtaaccactgttcctctgagatactcctctgggaaaatgacccgtgtctaatattttgaagttgtctgaggtaaaccaggttttgctatgtataaaaccagcaggtataacttgtccaactgtgatttttcttttttcttgttcctgtatctttcttccttgggttttggtataccaatgaagagaagtccgaaaccgtctggacaaaatgggcatgaaatatgtagccatatgtaactgcctgttctgagaatggactattttgcataaatttcagattctcacagttgattttactggttaagagttgtgagttgaattgttctatatataggtggtttatgtgattgcttttgctcacaaaaataaagctaactcataagacttaatgtagctaaacaaatggatttaataatcttagcttctttttgaaaagaactaaactgggaaaaacatttgttaactcatttcctttggctatgttatatttcagcacgtggcccagctcctacttgttgatatgtttaatgagattgggaaaggagtggtggctaggttaatgaagaagggagaagtccttgattctgaagagcattgacaggggaataacagtcctgggcagatgtagtaaaccatgcaggatagtcagggtttggatgctgataattactatattagcttaagctatgcacatttatcaagaagactgggagacttaacgggtgattggaaataaaatattaccaatatctttgtctt

SEQ ID NO: 76 - protein, 392 aa, Sus scrofa
MMEDDGQPRTLYVGNLSRDVTEVLILQLFSQIGPCKSCKMITEQPDSRRVNSSVGFSVLQHTSNDPYCFVEFYEHRDAAAALAAMNGRKILGKEVKVNWATTPSSQKKDTSNHFHVFVGDLSPEITTEDIKSAFAPFGKISDARVVKDMATGKSKGYGFVSFYNKLDAENAIVHMGGQWLGGRQIRTNWATRKPPAPKSTQENNTKQLRFEDVVNQSSPKNCTVYCGGIASGLTDQLMRQTFSPFGQIMEIRVFPEKGYSFVRFSTHESAAHAIVSVNGTTIEGHVVKCYWGKESPDMTKNFQQVDYSQWGQWSQVYGNPQQYGQYMANGWQVPPYGVYGQPWNQQGFGVDQSPSAAWMGGFGAQPPQGQAPPPVIPPPNQAGYGMASYQTQ

SEQ ID NO: 77 - DNA, 22063 bp, Bos taurus
gaagtgattccctctctcatttctaggaccacaattcacagacacatcaccttcccggaggttctctctctcttttttcttttgactcgagctggctgggtttcgccgaccggccggcgcacagcgacgacgtggttcgccgtgacaccgcaccgggttccctcagcggcccgtcttcctcccctcttagcgatcccccttgcaggtcgtcgccgccggcctgagcagtgacctggcgggccgcgcctgcgctctgccccatttcctgcctggctggtggcggcggccattttgtccatcctcctcctcctcctgctcctcctggttggagcgcagtgtccggagcgggctggggggagaaagcccgagagcagggttcggtgccttttcctctgtccccaaccggtgcccggagcccccctccccttcctccccaccccctcccctccccggccctgccctcccccttgtcccgggatcgctccgtcgcacccaccatgatggaagacgacgggcagccccggactctgtgagtacccgagacggagggggtaccaggcgctgggagaccgcctggcaccgcgggacgctgtgggaggggagcaggagtgcggggccgaagctgggacttctcagtggatccttggccgcggtggcgcggacgcgaagtgcattcctcatctgtcccttttttccttggaagggaagccctcccttcccccccaaatacagtcacttcctggggtccgggtctcgcttcgacctttccctctagctcccttctttgcacccccttcctaagctgggtttctgcacggcagagcctgtcaggcccgggagagctcctgctctccgtctgcttcgggagccctgggctgggccgggagctgcgggtcccccctcaacccccgcccgaccatgggggccgggcctggtgggggtgggcctgggggtgggatcgcagccacctcccactgtgggtcgcgaggaatcggcactcgcgccctccacgtccccggctccagtcgctgccggctcttctccctaagttgaactcccggaggaagccggacgctcgcctgcaactctagcccctactctgccccacgtgcccgcgcccacgctgtcagaaacactcgcccagcgcccgctactttgagagtgagaaagggatgcctcttgccgccggagcatcttttcccttcttggatgatgaagtttactttgagcgctacctacgctaaactgacaaccagttgttaaaactgcttttgctctcattggtgttatttcctcctaatctgttttttgggtcgagaccttcagagttggataaataggggtgtgtgttttttttttttaatcggctcttcgatgtgtgtcttttgagcgctctttcttcgatcttgctgttgctctttatctgaagcccagtgtaatgaatgaatttcatcttcgaattgctttttcgagtttccttgcctttctactgaagtaatgactcagcgtttgcattcctttgcaaatagtgtggcactcctttctttttttcctgccctttttttttttggaagtgtgagtaattcctagttacatgtttaagttgggtaccttgggttttcctaacgtttcgaagctcagcacacctgcctccggtgcagggagtcagccaggtcgctgctttgttttctcttccctctctgcctggtattgataggatcatagtccacttggctctacttggggacattactttggggggaatagacgaaggtggatcggtactcagaagtttgaccagtttctcttctgtactcctagcaaggaaagtgtgttctgtcaagaaggtagatatctgtgttcaatattggtacaagtttggtttcttgtcttgttgggaggggggagattacacttttttgttcctgtttctctaatgtctccctaaagtatccgctattctttctgagaatttgaggccagcttaagcacatcaaatgcttggatgaaaagcctgcttaggagaagttttcagtgtgtgttttgtgctgtcttccatttctgctgtcttttcccagaagagagaattgggacaagcttgaaatttgtcctcttgacatctgttgaagccaagacttgggatttagttagcaatgtgttcttggaaggaagcatctgggaaggctgaatttaggcctagcaagcatgtatttaacaaagagaaaagttacattgtatttaaaactctgaaatgtcatcattgcatcataatagcttctgaataattggtaaattcttgaggcacctttcacttccactgtatctgtttcttatgaagaattcctggtttttatcatgcgaaataaaatgctattgcagtagccttaattcatataactactttacatctgccttctcttccatctctatcagaccttactccacagactaacttgtcacttaagaattcttacctcgaccttctccaaactcctgttctttctcagtatgtttacagctgtctaaaaatgtgacatgtatacatataagtactgaagcatcttgagcctggttgtgcctgcatgtcagatgtcagcacatgttcgctcttcttcctttttcctgctcccactcttctccatgggaaggtttgttgttttttttttttagacaaggactgctacatcttcctaggtcttacccctgcctggaacgtaagaggtactcaactattttacaatgattttacttcttttcactaaatttaatattaagtccgttttttaagaaatcctgattgatttaaaattatatataggcagacatggtcatacatggtgtggtctgttgatttatatatatatatgtattaaacctcaaacgtacaattttgagataaaagcaaatgtttcacaattacatttttgtcagattttaataaaagtaatgcatattttacgtattcttaaaaggttcttttagatacgagtaacatgatgaaaaatttgaaggtgattttagagattgatatctagtaggggttttgtttatttatggagatccttcttttattttacattgtgatctttggtttgggctttaaagtggttggtatgttttaaaacaatgtactcttaacaaagtttatcttaaactgtttccttaaaatgcctgtgtgttactagtgaggtttttttcctgcagacacacacaagctaagacatatggttctatcatcagaaaacaatatggtgtttatagcctaggtaggtctttaaatattcattacctacagtattactaatttatttgatggtatttaaagtgatatagaattgctttgatgttgagcctaaagtttgtcatatagttgctttgaaggtctgttttctgatgttctttgttctcatttgacatttgcgggaggtggggggagctaatatatattgggtaatttgggatctaaaaaaacaaatgagaaaaattatgtgtaaaactggtgttggaagtgaactgcccaacacctgccttgtaggattcacatttcagatttgtgttgtgggtaactttgagtgcagtgatttgatccatggtatttctgaatctgttatacagcattaaatggtaattgtgctctactgtagcttcattttcttcatctattcgatgtaccacaatgaataggaattgtggatctggggttatacatggtgtgcagagccatcttgtaggctgttttcttccttatagagactcagtcaaaaggaggaaataaaccattgatttagggtataatctgaccatccaagggcaatagcagaagtaaatactattaaatcctattataaaattgattactctaccaagggtttggctgtattgggcctgaaattaaattaagcctctcattcaatttaatcgtattctgtttctctaaaatgtgtgtgtgtgtgtgtgttgatattccttatatagttggtcagttcacttataagtcctgtacctttcttctgccctgcctccttcctaaaatgaaatattgataaattgatcagttcattagaggcccattgaagaatattgttgcaaaatcttctcttacgtaagaatttgcaagaacaaaaccaaaaatgttacttagccatagcatcttgtgtaaaatgctgttaattttgacctttgtagggctaatcttttcagagtgagagcacagtcagcgatggaaagtgtgattagtcttctgaaaggcatggtgttcttaaaattctgcgcagtttgacataggaagtagtttggcaatgtggacttttgcctactgtgaaactgccaaattctagtctcaaatttgattttaaccctgatgttagggataaagacaccattttgcatttttaatgtgttaattcctacagttcctgttcttagaagacaaaatagacctaacgtatgctttttccccaccttgagttaaaaaatgtttcagaattccctaagtattttctcttttaattgtcgggtacgagcgtttgagctatttgtcttattctgttattctgtgttcttcaagtagaaatgttatatttaaatccttggaatgttagaatatgttgactgcctcataaccaaagcagaaagaaagtgtagaaatgacatataatttagaaggaaaaagggtaatatttcagtatactaccaagacgtgatatttttgccagaccaagccttgaatatttttgttagtatttattttgggacagaaactttatgataatgtcacggtacttaagctgtatagtatagtgttttaaaagttacaagatatttttgtattaagttgtatggaggatgaaggcaaatgtcaatgaatgaattacagaactctgagtgaaggaaaaggcagtcttgagatttgggtataatttaggtgaaattatgtgttgaattgtatcctttttatcctgtcagatttagatgtcttacatgtggttatggaaggccatttttatattagcttctggagtttgctgctttaccactgaacttttagtgaaaatatttgaaaaataggaaactttaaaactggactttttctataagtatttcatgacatcctaaaattaaccttttgctctttgttgctcgaaatgtaaattaatatatctaaatgtgcctttagaaattcttcagaatttgtattgatgagaaatagatggacttgaaataaagatcctatgaaacaggatgcccatgcaccctggactccattcaagtaacattggagtttttcctggaaagatgtttaaacactcatacaaatttaaaattatttaaatcatttacaatttgttacataaaagcaatactttttactttgttactagttagctttgataggtgaaactcctgttctcttagaaatgagctgctgctgctgctgctgctgctaagtcgcttcagtcgtgtctgactgtgcgaccccatagatggcagcccaccaggctcctctgtccctgggattctccaggcaagaacactggagtgggttgccatttccttctccagtgcttcagttgtgtccgactctgtgcgaccctatggacagcagccctgtccataggattctgtaggcaagaatactggagtgggttgccattaacttctccacttagaaatgagctaactgttactattttaggttagatgagttttaacacttcagagaccaaggttatagctaggtctaccttgtataaaaaattccaaggattcagactcacaaacccctatgggtttaaaagaaaaaagaaaggagacaggtgattgtctggctagctcaaaagtctgtaacctttcactactgctgggagtgtgtcctgcacagcctactcatgggtctgctctttaaatgtaacaaaaaaggtaacatagtggacctcaaccagttggtcacttgtttagtcttccattcaagtaacattggacttaggtttcatttttagggtgtgttaaagttattaggacccattacgatgaaattcttaggtaaacaagaaaattgctgttcattcttaatcagattttcttcttttacacttaaccttacctttctcagtcttgttttccctttcagagtgtcccaacttaaactctggcaactgtagatgcaaggcttatattggtctcaatacatcgtttccagatgttatatattacagttaggaaaataaagcttgttttcctttccagaagaaacagtgtttaaattttacaaatattgtttggtttatgaggatcataacagatgtgagttttaggaattatacactgagtaccggaaagacttaaaaagtttattcagctaaattgagataggtccatgatacaaggtggtcatctttgagtggcagtgttcttttcttttaaacttaacctgtatattaaatttcttaaacaatatatatatattcaacttgtaattttaaaaagacaaatttttagatatgttatagtcaaaactatgcctgaatttgtctttaattttttctgaatttctagagaaatctttatatttgctttgttatgtacataaagatgtattttgttgattctgatgcattttagacgaggaaattttgttattttactctgctctcctgaaacaaaataatgaagacataccatcaatgacagtcttattaccaagacataaaaaaatccttcaatctcttgtgtgttttgctataactttgattctgttctctgttcacgtaattgctttggttgagggtctgaggtaaactaaccttatatctgatacccctctatgattgggtgttttaatgagtcaatatttatggtactgtgtgtgttatacattattttgaattgtgtttcacatctaaacattgtagttttcttgagactggtttaaattattatttttattctaacacgagaaaatgatatataggctttggggtgcaaaatcacattgatttgctctttataaagtcttttgaagtgatactttagtgccctaagaagttatgctttcctaggtgagagttaatcttacatacaaagaatcaggcttaattggaaaaatttgattggagagaggaagttgaaatgaaagatgatgtgtaaatgataatgctttagagtcagagctgaagggagattgctgatagttgttttttttctcttcccatacagatacgtaggtaacctctccagagatgtgacagaagttcttattcttcagttattcagtcagattggaccctgtaaaagctgtaaaatgatcacagaggtaagagcttccccgatccaggtgctgacagttagcataatgtttaacattttgagatacatgagttgatttgtatcattttaagcctcaggttactagatggagagattagtgttttttgtgttgacttgtttgctttgactgacaaattaggtttagaagtcgagaggacaaagtgtctgcccttattttcaaatagtccttcatgatgctgctgtcttcaggtggttataaaaaattgttagagcttatctcaaaatactgagaaactaggtgatatttcatctatttacagtaagagtgttacacttgaatttcagggggtggtgtgtgcagaacattggcttattatgaccatagtgccacacaggcatcctgagcattgttagtaaatgctgcctgagcagcttgatgaaggtaggagtctgaattgaattgtttaatttattttccttttttccccctcaaaatattactttttatactttgctggtcagtgacttgtgtttcagtttattctcttcttcttttttatttgttaacacttctttttttttggactattcagtttgtgccaggtgccatggtaagtgctagggatacagtggtgaataaaacagttcctagccctgtagaattttccagtctaatgagggagacagaggcgtcaacaggcacgaatggtaataggatagcaaatgctggggaagctggtggtttccagtgctctaggagcatatgggtccacatagtctccagtcaggggagggttcttggaggattcagaaagggtagtggaaactggctagataggaatctgaggaagaagggaatccaggtagaagaatgttgatccagcccggtagacagagagtgggagttcttgtgagattgagagaaaaataaaaaccataacatggttaagtttggaatgggattcgtcttctgagatgccaggagataaggcaggagcattcatcaggggccagagctgtgttgaggagcttgtgtgatgtcctcagacgggagaaactgttaaaaacctctaaagcaaagtggccttttgatctcctttcctacctaacagtgattttctctctgtctggtgtattacctcttctttccttcctgtctgtgattattactccttctctcttttcattcatcacacatttccttcgtacttggcaccattcagagcactgggaacatactgcagagctagaccagcagggtgcccaagagttcacatattaatgagagtattgtcaacaacagtaaactgtcgtggaaaaccgtgaacggtgattctggatagggataagagctttgaagagatgaaacagttccgtgatgatgagtggagtgttggtgccgtgtagcctgggtggtgaggggaggcgtcctgctgccgttggtatctgttttgtgaatgtaataataaaggttcataaggagatgggaatggaagttgtctaattgaatgttgaggctttttggttatggtctgtgatccagaaatctctctcgtcagttgactcagccaaattttaaaggatcaaatgagtctttttcagactgtggatgttgggtatgggaccagcctggtaatgattgctgtcagaaatcatcacctctttgagctgagatgggaataacaagatggtgctgcctacattaagacctggaggcagagggaacagcccatacaaaagccttgagttggtagttagcttgggtgtttgaggaaccaaagaccagggtggctggagcctgctgaatgatgagaaatgagtaggcaggcagggtttggaatcagtagggcagtaccggccatgacagggtgcttggatcttattgtggttgcacccggggctttaggttgggtggtaaagtattcctgtttgatttcgggggaggggctgtgctgggtcttcattgcggggcttggattttctctagtcttatatgcattttaaaggtgactggaaaatgactgttgtagggaggatggattatagggggcaaggggctgaaggagaaggaaactagctgtgtctgtttcactagtcaaggtaagagatgctgtggcggacttgttctttagagtggtagccacagaagtagaggtagataaatttgagatgaattttggacgcagcgtcaataggactggattggccatggaacacagggaaatgaagacatcaagaaaaccccctaagattcttgtttgtggttgtgtgggtggtaatgctgtttatttgctaaaatgaacatgactgaagggggcacaggatggatggggagtggtgagaatcacgctctgtgttggcagtgttaaatttaagatgtgttttagacatatatcaataaatggacattatatatgggcagttggataaatattttggaactctggggagaccaatgctgatgatactggcttgcagtgatatttgaagccatgggactggatgagatgtggttcgtagagctagagatagcgctgagagaggagagagtaggggggcctaggtgcgagccctggtgcatctcagcacttgccgttcagccgctaagtcatgtccgactctttgtgatcctgtgaactgcagctcgccaggctttccccaacacttagtgacagtgataatttgagttaagagggaaaaatgccttcagaaagatttccagtgaggaaataggaaaaccaagagcatatggtgaatctagaggagaatatttagaagaggaggagagttgtcaactgtgttgaattctgcttgaaagtcaagatgaggaagaaaagggatcacagagatggcagagaggtcattggtgagctcagcacaaaatttccttgccgtggttgggttagaaactgactggagtgtgtttaggaaagaatggaatgtgagaaagtggaaagtcactagaaagtgttttgagaaacatttgttggttgttgttgttgttgtttttattattaacttatatgcacaatcagccacttgagggtagaagggtttgaagtgaactttcataatttatccatgttgtacaactcctacacttgaacttgtaaatagttttaaagtctcatatttctctgctttgatatttatgtcatccaacaaaaattggtgacaacatcaaggtaaggacacagtcagttttaaatttttttccctttgggtgcacagcatgtggtatgttagggatctaacccgtggccttggaagcatgggtcttaatcactggaccaccagggaagcccccagagcgtcccttggcagtggtgtaaatggaacgctttcaaaggccatgaactccactgccgagtattggtttcctttcatcagtttcatttcagtgtgtgagaaatctctttcttgcccttatgatgttctactttagatattttatcttagactgtagctgctttccctgtatacatgtgtgtatgtgtgtgctcagatgctgtgttgtgtctggctttttgccaccccatggactgtagcctgtcaggctcctctgtccatgggagtctccaggcaaggatactggagtgggttgccacgccctcctccaggggatcttcccaacccagggatcaaacttgagtttcttaagggctcttccattggcaggcagattctttaccactagcgccacctgggaagctccacctccatatactatagtaagtgtacattaccaattctaaggcagatgttaaaatttaattttaacatctctgacagtgacaaaaaaaatcaatggtgtcttaagtgagatgaaatgcagtgtgatacgaatatctaagtgtgtgtacacatgtatgtgcgtacattgaatgggatctgacctactgctagttagagaaatctgcagtcagtatgcacaagtagactaattacctgaagcctgtcacagttgtactctaccattggattcctgtacattttactagttatccacgttttcctttgagaccatcaggaaaagaggtaggataaagaggaaagctgactagcacagacttagcatcttacttgagatcctttcttcaatgaatgttactggtaaatgtcacctctttcacaaaaggaatttgaatgtgtgcttctctttggagcctttacccgtttcctttctctgcctcgcaagtacaacagagttcacgttcacgtggctacagtagggttttgtgtgagagcccacagttttcttgtcagtattaacgattacactttttttccctcaaggaaatgccttctggttgcttcaccactattgttttagacgtcttattttggatttttcttctaaaactttcctggaatgaaaaacagtggttgttgaaaagagctttattttatctggtatttttaatcccttgtaagtgcaactggaattgccatattttaaatattatttttagtgtattttacattgaacagtgatgaatatttttagcctacataaaacatatttgtacaattgtatagctgttcattgtaggttgctgtcttacaaaaattgatttccattttggttcataagtgatatagttgctataatttaggtactttcttttatattgttgtgtttttttgttattgttgataattttatattgtttatttaatatttattggtgttgtattagacactcttatattggcattttctgatgtaaaatcatagctttgccttggaatattttattcagacacattttcagaaaaccttttcgtaatcactagtacatttttctggtctttggaaggccaaattcaaagtgtatagaatctccaatgctttcaaagcttttgaaagggatttcatttcaacacttgattataaatctgaaatttttcagtttccattcttattccttccttatccagagaaatatatcatcttgtttcatcatgtatagtactaatcctagtttcgatcaggagtaaagtttgtaaagttggttcatttctgtatttttttatagtcatgggatacagtttatgaaggattatgatgcttaaatagagttcatccctttgaaaataatgttgggagaggagagcagtggtaaggcgtggtcctcatctctcagatctgagcttgttttgtttagtataaacttctgttttatatttaacatttcaccagaatcctatatttttatttaatactgatagtcatgattctctactgctttgtagttctgcttgagtacaacaatattctgaggtacaaagccaagtataggtgtaaatcttataaagtgttcggctttgtaaagtgttaggctttcataagcttatacagtctcacctcgtacattcctagctatcagtaatgttttttcctggattttcttctcagcaacccgacagcagaagggtcaactcttctgttgggttttctgttttgcagcatacaagcaatgacccatattgctttgtggaattttatgagcacagagatgcagctgctgcgttagctgctatgaatgggagaaaaattttgggaaaggtaagatcataaatgatggcaccttatgagtatatctatctgcatgtcagattagtttgtgttctttcttagcaagtttttaaacaaatactcagctctgccaagtgatggttttgttttcttcagcttagtgcttttaccaaaattcattctgcttgataaatgatttaataagtggtaagtggtatgaatcataatgacatgcctaataattttatgaaatataatctttatttttaggaggtcaaagtaaactgggcaacaacaccaagtagccagaaaaaagatacttccagtaagtactcctgctgcattttacggaagagttctgaaattaccctggcagcattaccagctcacacagggctttgtcttccttttagcgttgcctaaaaaaaggtttagtccctgacttcttaaatatttgattactaaatgctttgatttcagatcatttccacgtgtttgttggagatttgagtccagaaatcacaacagaagatatcaaatcagcatttgccccctttggtaaaatatcgtaagtatcataatcaatactatattcaatagcaataggcaaaagtgtatatgatgaacttgtatcagagttaagagtttctttccctagttagtgtgattttttttgtttgttgtttgtttggtttttttgattagtagatgttgttgaaaatgttaatgtcctttcaatgttttggggtcttgttttcatctaatcctgtgtataacatgtgaaaaaattttaagtgattctatttgttatctttaaagcagatgtttgggtggtaatgcctattataaagtctagcttttgtcaaatgttttcaaaatttggttgttaaagatactggttaaccaaaattaaatgtgatttgcgttgtgtattaaacttttatagaaggaatttataagtggggaaaagtagagaaatccttgggtatattgtgaaattagaaatgtatatgttattataatgataaatgtgttttgatattttagctgaaaagtagcactattacagtatgaaaatgtttcaatgtctgagccataaatgtgggattaattagtagattatggtgtttgattctgctagttagggccaaattgtggtttatttatttttttaaacaaagtttatgctcagattttactgtattgttacttgatctaatatattggaaaattaaaagtggttacaagttctgtaaaatgtttatcacaatttatctagttaaaatcacattattttatgtatttatttcctgtagatttaagttaaatgttttagtactttacaaaaatatgtttcacctaagaacaacactgtagattttatttgatagatgtaattcttaattttctattttgatatttgctttgctttttaatctctaataaatgtggtaagtagtactgttttaaaaatcagtgtaaaaaataatacaggttgctgtttttcaatctttatttatacctgagacctgcagtttttctaaagtccaagtcacaattaaaagtaatagcattctggttattttgcagaattgctcataagaatggacaggatcttgaaggctaactgcaaggaactgtgcacactggaactcagttgtagatttttttctcatttctatttattattattatacattatttatatatacatattttagtatttacattttaacattctatattcagtggagttctatatttccaatcattttaacttactcactaaaatttctgtgtaaatctgttgttttcgtactggtgtgcttagcattgttgttagttttttattctcctttcttaaatttctgaaaatgtcaatttttcaaaatttacagctgcccaaactccaaaatgatggtagagaattgaccaagaaaaataaagaaatctgttaacaggccatgtatgcctttttaattcctattttttcctctttttcaattttttaatatttcatatattttgtatcactaggcagaaaacatttaactatttagagtttgcatggtaaagtagttagcattgttacagtaatttatagaaccagtaaaccttagcggacactagccgatagaatattagcaaaggaaactattgttcctattaatcttcagatttgagcatttagtttagaaagcacaggctatttgattaggttgcatgtttattacatgtttttgtcctactgcttttttctaacaggtaaagaagcgttagggagagttcaggaatggctgtagttaattagggctaactgaaattttatttaaaaaaatgctcacaatacagtgtgtgtggttccttttagtttttattttgaggatgactctcacttccctcatttagctgtgcttcttttcacagggatgcccgagtagttaaagacatggcaactggaaaatccaaaggctatggctttgtgtctttttataataaactggtatgttctttcggctcaatttgaatttaatacaaaattcagtcatcagtaaatgtttttggatgttaacaaacacgatgattgtgtgattttgtttgtttgagtaatagagcatagttctttttttttttttttccataagcttggaaataaatgggaaaagataggctggttataaggtgatgataagggagaatattgaagtttgcagttgtgacttggtatgggtaagatgtgttagaaataaaactcaaaattaggacgcatgagctaacctcagaatttggagggaaggtaaattatatttgtcttaaccatgaaaatctcaattttaacttcttaattatattatctgtatttttgtagctgggatggtaatgactacagcaagttatgtaaatgaaattttaggcaattcatattgatttttgcatgtatttaagaaaaaggcaccaaatatctaagcatttgcattaactgtaacatcagataatataatgggctttgatattaacattttggaacagtttcaacactaaattgcacgttctgttgaagcaggaagataaagggacgagcgttgtagtttttttggctgttctgagtcttagttgtggtgcgtgtgattcctagttttccctgtgcgtgcaggctctttagttagaggcatgcaggatctagttccctgaccaggggttggccccaggccccctgcaatgggagcccggaatcccaggcactgggccacgagggaaggccttggagtcacgttgtgttttcgattagattctttgcaaagcacattaacctctataatctaaactcactttttggggaactccctggcgttccagtgattaggactctgcagtcccattgcagagtgttcggactcgatctctggttggggacctaagatcttgcatgccatgtggcatggccaaaaagaaggtttttttaaaacattctaaatcaacgcagaagctttttgtcttaagctttaaatcttgtgtcatagtcatgtgtgtatgcatatgtgctaagtcatttcagtcgtgtccaactctttgtgatcccagggactatagcccaccaggattctctgtccatgggattctccaggcaagaatactggagtgggttgctatgtcctcctccaagggatcttcctgacccagagatcaaacccttctctctcagtctcctgcattggcaggcaggttctttaccactacatcacctgggaagccctgtcataatcataatccattgctattaaaatgtagatttggtaagggataagatgatttagaccataatatcaagagtttttagatactctacagtaaatgttatgttacggatcaacaagatatttaaaaacaactgtgtcccttttcttggttataagtgggattgtgatttttctccttgcatgtttgaattataaatttcccttgatgcttaaatgctgttcctagtatcttaaaatgtataaataaacattgctgtaatgagtcacttactgataagattttttgtatccagaaatgccaacattttatttcatcttagtgagtcttgtgtaccattattttctgtgttggtaatcgctcttttccttatttccttcacaggatgcagaaaatgcaattgtgcatatgggagggcagtggttgggtggccgtcagatcagaaccaattgggccacacgtaaaccacctgcacctaaaagtacacaagaaagtaagctgcgtctgcttttgtgtttttaacggcacttcacagaatcgtctattcgtatagtcttcatttcttaaaatttaactttgttagcattgtaagactcgtttaattttccatatatttatctgaaaataactgggctttgatgtaagtatatttgaagctgtgaaccagctgggttcataggtcaaatcaatagtgtcaaggagaaaaaagttctgtttctccccacagtgaggcatatctcatatctttatagtattaagtaacccattttataatgctgtataaccgtcaacacttttttctttctttctacatacagataacactaagcagttgagatttgaagatgtagtaaaccagtcaagtccaaaaaactgtactgtgtactgtggaggaattgcttctggcttaacaggtatagtgaatcttttttcctagttcccttctctgtggagcttcatcatcattagtagtaatttcttgataacatgaaccttaaatatttttacattttttgtatgtttatttttcagatcagcttatgaggcagaccttctcaccatttgggcaaattatggaaatcagagtttttccagaaaagggctattcatttgtcaggtataattctaccttacatgtgatccattcccttcagttatattatttgatcccctcaagtatgtgtttgttaatttagtacttctttgcaatatagaactttaaactgcctacatgatgtgctttaggaaaataccaagttgataggtttaagctaaggggtttctgtattactaagttcttttaaaaaaaacctccttctcttcctctctcagattttctacccacgaaagtgcggctcatgccattgtttcggtgaatggtactacaattgaaggacatgttgttaaatgctattggggtaaagaatctcctgatatgactaaaaactttcaacaggtaattcgatttttcgtagcactttttaaggtttccatcttacatatctacataagagctttagaaagtctgtaaaagaaagcaaacaaaaaaaaaagcatatagctgctttcagttgattttattaatgctatttcaaaagtgattattttacggtattaactgaatcttaatactttcttttcacaggtgtcaccaccccaataaacttagacaatgataaataacagagtcctattcacataagggtgcttacttagtttttctcttccttgtctcccactttcttcaaatactgtgtttcttactcatttcctaaaacagtaatttgctttttcctaggttgactatagtcagtggggccagtggagccaagtttatggaaacccacaacagtatggacagtatatggcaaatgggtggcaagtaccgccttatggagtatacgggcagccatggaatcaacaaggatttggagtagagtaagttgtttgagtttttccagtgtagaaacagatgaagttccagcaaaaggaatctaaaagtatgttttactggggagaatctttgtaaattaaatacattgaactatgtggtattataaacattgtagaagccttatgaaaaatgctaaaactttgctttttataatctaggtggaaagggaggttgggatagcatttgatgtgtcctactcactctgtgagcagttggtagagtttgacttatatttctaattcaccattttatctacttatttacttttgtatggaaaagatcttttgtcttatttatgttcagaaatttaatgcttcatgcctattaccttgtgtgagaagtctcccaagatttatctaatacaaagcagcttaccctttttgttttatgggtcaattgcgttgttccttatactttttccccctgggccagcctagatctttattctcagcagttgctcctcccccttccagtgtaaacatgtgttttttaaattgcttataaattgatacacgtatttactatgtgtgcagtatttggagggtagatgtgttgaatcatttgttattttttttttaaaaatcagcttctagatatttatcagacaacattatgttgtctaaacaaaaatttaagacaatattaaaacattttgcatatatggctagatatgtaacatttattactttgctctttgttgtaagtatcttgatttcttgtctattctgtgattaggctctgcttgatttctgtgtaaatgtatagatgatttttttatttgtgttggctgaagttttttctttttctttctttcttccaagtcaatcaccttcagctgcttggatgggtggatttggtgctcagcctccccaaggacaagcccctccccctgtaatacctcctcccaaccaagctggatatggcatggccagttaccaaacacagtgagcggggactctaaacaaaatgtaattcatgatagcttcaatttccttgtgacactctgaagacatgaaagtagacatcggaaaatgaaaatatttattttaaaaattgaaatgtttggaacctttagcacagctttgctttggtgaaggacacatgtcttctagttctgcctttttaagtttttgttcatgatggatatgaacatgatttttctttgtgtataaaaactaaaataaagtgaataaaaaattctgactacaaattttgatataataggagaaatgggtaatacattttgattcttagatactattccatttttatcttgctgttcagtattttaactcactgtgtttttaaaagagcaaaaaagggaggatcgtgaaaaactgggaatcacatataagttcatcctgaattttgatactcccctcccctcccccgaggtggaccacattcgaagtcagcaggaaaaaaaaagtgatattgagaagaaatgcatgattttggagtcgctttggaggaaatactttctctgtgcctaaagaaactgaaaccagactgataaaagaaattttgtaacctaaataaggaacagcattgtctgacttgagcaaatgttggtggtccacattaagacatatttttaaaactttaaaaagtgttcataattaaaactgtagtaaactacatttcattttgggggggaaaatcccaagtatggtgtttgtattaaagtcagacagtcatacctatgcttttacatgaactttaaatgatatacattgtaaatattgaatacagtgttttaaaagcatgcttcaacatagaagtagcaacaatgtaattatttgaagtaacacttaacacactccactgcattgaatgcagtggatgaataagaatgtttaagactgacgtttccaaggttggctactatgtaagattaaaattatacaaatgacagaaaaagccttaattttaatttcatacaaatctgatgcattagtacattttaaaatgtcattggaaattagattttttttttcttttttctctttttgctttacatcatctggtatgtaaataccttgattaaaaccttgtaagcctatttcaaggttcctataagttgtatagtacaagcgtttttaaaaaatcttggggtgttttttaaaattagatatattttgcccaagaatttttttaacaagattgttaaaacatcttatttagacagtttgatgtaccaatttataattggatattcagcttaaatagtacacagagttgtgacttttatttttaattaattttttccttgtgggtagtgtgcatgggatgacaagtctgaacagaacctgagctgtatgagtgcagagtttgtaaatgatttgattgggtaagattaacacttgattctgaggtatttttcaggccatgtgcataaaatctgcctcaaatttctatcataacaggaatgtaaaagaaaaattctatttgaattctaacagctagggggtgcaaatgtttaggcagtgtatttgaaatgttttgaagtctgggcaccaaaatgaaaaaaaaactctttacagttatactataagatacagttagcacccacaaattactggtttttaaacttttgaagtcttataattagctttaaaataatggttttgtaaattggtctccacagtaattttggtattttccttcttcccccatttagaaatttattaaatatgaaaatttagagtctgaagttgttcgtcttcaggccaaattttttatgggactttagttttaaccacagtactcgtttattacattcatctattataaaatttacccttatttcttttgttcatggttagtatctttgggggacgttatggaaaatttactttatattttataaggaaacactcaaattattcaattatgcctcctagttaaatttttcttaaatatatgtgaaacttgaactaaactctcagtttgccttttttggtctgccagtaaattaagtagcttgttgcaacaccagactagtaaatactgcatagtaaacatgtgactgaagtcttttcatcttaatctgaaagaacaagattatgtgctcagttcagttaatggaaattattaatatttcttattaaatggtttttaaaatataaagctacttatccaaatgaaatgtaccattttaaaatacaactatcaagctaacacagactcaagactattttataacacagagtgaagtcagtgctatcttgatccaatttaagcctaagaatcgttgccttttccatgttcattaaaaacagcagcaaagatgctttggcagcaagaaaatgtttatttcataatcactttgagatttatttttggtgatgtgtttctgactgccacctttgctctgatctctctactagtatttcccctcatgccattaccacttgattttcatgtctgctggcagtgagaggctgaaatgactggccaacttaagccaaagctgtaaacaacagttgaagttaagtctttcaataaagactagactatatgagtga

SEQ ID NO: 78 - protein, 409 aa, Bos taurus
MMEDDGQPRTLQGLLHLPRSYPCLERKRYVGNLSRDVTEVLILQLFSQIGPCKSCKMITEQPDSRRVNSSVGFSVLQHTSNDPYCFVEFYEHRDAAAALAAMNGRKILGKEVKVNWATTPSSQKKDTSNHFHVFVGDLSPEITTEDIKSAFAPFGKISDARVVKDMATGKSKGYGFVSFYNKLDAENAIVHMGGQWLGGRQIRTNWATRKPPAPKSTQENNTKQLRFEDVVNQSSPKNCTVYCGGIASGLTDQLMRQTFSPFGQIMEIRVFPEKGYSFVRFSTHESAAHAIVSVNGTTIEGHVVKCYWGKESPDMTKNFQQVDYSQWGQWSQVYGNPQQYGQYMANGWQVPPYGVYGQPWNQQGFGVDQSPSAAWMGGFGAQPPQGQAPPPVIPPPNQAGYGMASYQTQ

SEQ ID NO: 79 - DNA, 20 bp, Sus scrofa
ggctaccacatccaaggaag

SEQ ID NO: 80 - DNA, 20 bp, Sus scrofa
tccaatggatcctcgcggaa

SEQ ID NO: 81 - DNA, 20 bp, Sus scrofa
gaagtcaagacccacggaga

SEQ ID NO: 82 - DNA, 20 bp, Sus scrofa
agttcccagcacctcctttt

SEQ ID NO: 83 - DNA, 20 bp, Sus scrofa
tgtgggtacgaccttggctg

SEQ ID NO: 84 - DNA, 20 bp, Sus scrofa
catatccgcgtcctccatgt

SEQ ID NO: 85 - DNA, 20 bp, Sus scrofa
accacacggacttcaaggac

SEQ ID NO: 86 - DNA, 20 bp, Sus scrofa
cgtagatcttcctcgctcca

SEQ ID NO: 87 - DNA, 20 bp, Sus scrofa
tcgtgctctgaccttgaagt

SEQ ID NO: 88 - DNA, 20 bp, Sus scrofa
ctcttgccatctccttgtgc

SEQ ID NO: 89 - DNA, 17 bp, Sus scrofa
aggcggccgaccaaaac

SEQ ID NO: 90 - DNA, 20 bp, Sus scrofa
ggcacgaggaacagagtcat

SEQ ID NO: 91 - DNA, 20 bp, Sus scrofa
agctcaccgaaacactgagg

SEQ ID NO: 92 - DNA, 21 bp, Sus scrofa
caggcacaggttctctcttca

SEQ ID NO: 93 - DNA, 20 bp, Sus scrofa
gcccgtacctgagcttacag

SEQ ID NO: 94 - DNA, 20 bp, Sus scrofa
aggcatggcgtagagtttgt

SEQ ID NO: 95 - DNA, 20 bp, Sus scrofa
atgtggcaagtttcctggac

SEQ ID NO: 96 - DNA, 20 bp, Sus scrofa
gaaacttctcctcgggcttt

SEQ ID NO: 97 - DNA, 20 bp, Sus scrofa
cctccaaccatgatgaatcc

SEQ ID NO: 98 - DNA, 20 bp, Sus scrofa
acacaggcagctgataacca

SEQ ID NO: 99 - DNA, 20 bp, Sus scrofa
gagaggcggctttcaagatg

SEQ ID NO: 100 - DNA, 20 bp, Sus scrofa
taaccacctcgtccacttcc

SEQ ID NO: 101 - DNA, 20 bp, Sus scrofa
cctacgggacatgatcagca

SEQ ID NO: 102 - DNA, 19 bp, Sus scrofa
ctccagttcactgtccggc

SEQ ID NO: 103 - DNA, 20 bp, Sus scrofa
ggtttatgggcctgaagaaa

SEQ ID NO: 104 - DNA, 20 bp, Sus scrofa
gatccatggaggaaggaaga

SEQ ID NO: 105 - DNA, 21 bp, Sus scrofa
gggttctctttgggaaggtgt

SEQ ID NO: 106 - DNA, 20 bp, Sus scrofa
tgccttgcatatctcctgca

SEQ ID NO: 107 - DNA, 36 bp, Artificial Sequence
  synthetic
gggaactggatgtcttaggtcaactgtgcccgtttc

SEQ ID NO: 108 - DNA, 35 bp, Artificial Sequence
  synthetic
gggaactggatgtcctattcaactgtgcccgtttc

SEQ ID NO: 109 - DNA, 33 bp, Artificial Sequence
  synthetic
gggaactggatgtcctatgactgtgcccgtttc

SEQ ID NO: 110 - DNA, 36 bp, Sus scrofa
gggaactggatgtcctatgtcaactgtgcccgtttc

What is claimed is:

1. A method for producing a non-human chimeric embryo with donor-derived germ cells, the method comprising:
providing a host embryo comprising an inactivated primordial germ cell (PGC) specification gene; and
complementing the host embryo with donor cells to yield the chimeric embryo, wherein the germ cells of the chimeric embryo are exclusively derived from the donor.

2. The method of claim 1, wherein the inactivated PGC specification gene is PRDM14.

3. The method of claim 1, wherein the inactivated PGC specification gene is PRDM1, SALL4, IFITM1, DPPA3, DDX4, KITLG, DAZL, DND1, PRMT5, NANOG, AICDA, or TIAL1.

4. The method of claim 1, wherein the host embryo is complemented at the blastocyst stage.

5. The method of claim 1, wherein the host embryo is complemented at the 4-cell stage, 6-cell stage, or 8-cell stage.

6. The method of claim 1, wherein the donor cells comprise one or more pluripotent cells.

7. The method of claim 6, wherein the one or more pluripotent cells comprise embryonic stem cells or induced pluripotent stem cells.

8. The method of claim 6, wherein the one or more pluripotent cells comprise a blastomere of a 4-cell stage donor embryo.

9. The method of claim 1, wherein the animal is a mouse.

10. The method of claim 1, wherein the animal is a pig.

11. The method of claim 1, wherein the animal is cattle.

12. The method of claim 1, wherein the inactivation of the PGC specification gene is accomplished by gene editing.

13. The method of claim 12, wherein the gene editing comprises use of a TALEN, a zinc finger nuclease, or RNA-guided CRISPR-Cas.

14. The method of claim 1, wherein the inactivation of the PGC specification gene is accomplished by injecting a zygote with a Cas protein and a guide RNA that targets the PGC specification gene.

15. The method of claim 1, wherein the donor cells are from an elite animal.

16. The method of claim 1, wherein the donor cells are from an animal with poor breeding performance.

17. A non-human chimeric embryo produced by the method of any one of claims 1-16.

18. The method of any one of claims 1-16, further comprising:
transferring the chimeric embryo into a recipient female animal; and
allowing the transferred chimeric embryo to develop to term as a chimeric animal.

19. The method of claim 18, further comprising:
collecting semen from the chimeric animal.

20. The method of claim 18, further comprising:
breeding the chimeric animal with a second animal to produce one or more progeny animals.

21. The method of claim 20, wherein the breeding comprises natural mating, artificial insemination, or in vitro fertilization.

22. A method for producing a non-human chimeric animal with donor-derived germ cells by blastocyst complementation, the method comprising:
injecting a zygote with a Cas protein and a guide RNA that targets the PRDM14 gene or the PRDM1 gene and allowing the zygote to develop into a blastocyst;
complementing the blastocyst with embryonic stem cells from a donor to yield a chimeric blastocyst, and
transferring the chimeric blastocyst to the uterus of a female recipient animal and allowing a chimeric animal to develop, wherein the chimeric animal comprises germ cells exclusively derived from the donor.

23. A non-human chimeric animal produced by the method of claim 22.

24. A method for producing a non-human chimeric animal with donor-derived germ cells by embryo-embryo aggregation, the method comprising:
injecting a zygote with a Cas protein and a guide RNA that targets the PRDM14 gene or the PRDM1 gene and allowing the zygote to develop into a 4-cell to 8-cell stage embryo;
complementing the embryo with a blastomere from a donor 4-cell stage embryo to yield a chimeric embryo; and
transferring the chimeric embryo to the oviduct of a female animal and allowing a chimeric animal to develop, wherein the chimeric animal comprises germ cells exclusively derived from the donor.

25. A non-human chimeric animal produced by the method of claim 24.

26. A non-human chimeric embryo comprising host cells and donor cells, wherein the host cells comprise an inactivated primordial germ cell (PGC) specification gene, and wherein the donor cells exclusively contribute to the germ cells of the chimeric embryo.

27. The chimeric embryo of claim 26, wherein the inactivated PGC specification gene is PRDM14.

28. The chimeric embryo of claim 26, wherein the inactivated PGC specification gene is PRDM1, SALL4, IFITM1, DPPA3, DDX4, KITLG, DAZL, DND1, PRMT5, NANOG, AICDA, or TIAL1.

29. The chimeric embryo of claim 26, wherein the animal is a mouse.

30. The chimeric embryo of claim 26, wherein the animal is a pig.

31. The chimeric embryo of claim 26, wherein the animal is cattle.

32. A chimeric animal developed from the chimeric embryo of any one of claims 26-31.
